(19) United States
(12) Patent Application Publication
(10) Pub. No.: US 2014/0303027 A1
(43) Pub. Date: Oct. 9, 2014

(54) GENE EXPRESSION PROFILING FOR THE DIAGNOSIS OF PROSTATE CANCER

(71) Applicant: Caldera Health Ltd., Auckland (NZ)

(72) Inventors: James Douglas WATSON, Auckland (NZ); Clare ELTON, Auckland (NZ); David Rex MUSGRAVE, Hamilton (NZ); Helene BELANGER, Auckland (NZ); Kay Alison APPLEYARD, Hamilton (NZ); Kristen CHALMET, Auckland (NZ)

(21) Appl. No.: 14/311,156

(22) Filed: Jun. 20, 2014

Related U.S. Application Data
(63) Continuation-in-part of application No. 13/930,852, filed on Jun. 28, 2013.
(60) Provisional application No. 61/948,486, filed on Mar. 5, 2014.
(60) Provisional application No. 61/665,849, filed on Jun. 28, 2012.
(60) Provisional application No. 61/691,743, filed on Aug. 21, 2012.
(60) Provisional application No. 61/709,517, filed on Oct. 4, 2012.

(51) Int. Cl. C12Q 1/68

(52) U.S. Cl. CPC C12Q 1/6837
USPC 506/9; 506/16

(57) ABSTRACT

Methods for diagnosing the presence of a disorder, such as prostate cancer, in a subject are provided, such methods including detecting the relative frequency of expression of RNA biomarkers in a biological sample obtained from the subject using NGS technology and comparing the relative levels of expression with predetermined threshold levels. Levels of expression of at least two of the RNA biomarkers that are above the predetermined threshold levels are indicative of the presence of prostate cancer in the subject. Also provided is a method for preparing a reference standard for quantitating the relative frequency of expression of RNA biomarkers in a biological sample obtained from the subject with a prostate cancer lesion using, for example, NGS technology.

### REFERENCE TO RELATED APPLICATIONS

[0001] This application claims priority to U.S. provisional patent application No. 61/948,486 filed Mar. 5, 2014, and is a continuation-in part of U.S. patent application Ser. No. 13/930,852 filed Jun. 28, 2013, which claims priority to U.S. provisional patent applications No. 61/665,849, filed Jun. 28, 2012, 61/691,743 filed Aug. 21, 2012, and 61/709,517 filed Oct. 4, 2012.

### SEQUENCE LISTING

[0002] The instant application contains a Sequence Listing which has been submitted electronically in ASCII format and is hereby incorporated by reference in its entirety. Said ASCII copy, created on Jun. 18, 2014, is named 24700.1009C_SL.txt and is 729 KB in size.

### TECHNICAL FIELD

[0003] The present disclosure relates to methods using next generation sequencing and RNA biomarker compositions for diagnosing and defining the staging or progress of disorders such as prostate cancer.

### BACKGROUND

[0004] The use of prostate specific antigen (PSA) as a diagnostic biomarker for prostate cancer was approved by the US Federal Drug Agency in 1994. Together with a digital rectal examination (DRE) and prostate biopsy to determine a Gleason score to stage the cancer, the PSA test has remained the primary test for use in prostate cancer diagnosis and in monitoring disease recurrence. In May 2012, the United States Preventive Services Task Force (USPSTF) downgraded its recommendation on using the PSA test for prostate cancer screening to a “D” (Annals of Internal Medicine, May 22, 2012). The USPSTF adopted this position because it decided “there is moderate or high certainty that the service has no net benefit or that the harms outweigh the benefits.”

[0005] A blood serum level of around 4 ng per ml of PSA is considered indicative of prostate cancer, while a PSA level of 10 ng per ml or higher is considered highly suggestive of prostate cancer. If the results of the PSA test and the DRE are abnormal, a biopsy is generally performed in which small samples of tissue are removed from the prostate and examined. A Gleason score based on cellular changes in the prostate has predictive value in the range of Gleason 2-4 and Gleason 8-10, that is, at either end of the Gleason spectrum. The predictive value for men who present with a Gleason score of 5-7 is more uncertain and this latter range is where the majority of men present. In particular, a Gleason score of 6 encompasses men who may have an indolent form of disease, and also men who are at high risk for cancer progression.

[0006] As a result many men diagnosed with cancer with a Gleason score of 6 and having an indolent cancer are treated unnecessarily at high cost to health systems as well as risking the patient's quality of life, such as through incontinence or impotence. Prostate cancer is the most prevalent form of cancer and the second most common cause of cancer death in New Zealand, Australian and North American males (Jemal et al. CA Cancer J. Clin., 57(1):43-66, 2007).

[0007] The use of the PSA test cannot simply be dropped until a new test is available because at least some of the men incubating life threatening forms of prostate cancer presenting with rising PSA levels would be missed until their cancers are well advanced and treatment options are more limited. Due to the economic costs of national screening, the need to avoid unnecessary over-treatment, the loss of quality of life, and/or the presence of progressive cancers producing only low or background levels of PSA, the need for a better diagnostic test for prostate cancer could not be clearer.

[0008] The need for gene-based tests is also evident as histologically identical prostate cancers can develop quite different clinical behaviors. In some men diagnosed with prostate cancer, the disease progresses slowly while in other men the disease progression can be rapid. There is a need today for a greater understanding of the genetic changes responsible for these behaviors in prostate cancer to enable better management of the cancer in patients. New tests are required not only for more accurate primary diagnosis, but also for assessing the risk of spread of primary prostate cancers, and for monitoring responses to therapeutic interventions.

[0009] There are further reasons underlying the need for gene-based diagnostics of this type for prostate cancer. Prostate adenocarcinomas, that is cancer of epithelial cells in the prostate gland, account for approximately 95% of prostate cancers, while the neuroendocrine cancers are rare but account for some 5% of prostate cancers,

[0010] Some 15 to 17% of men with prostate adenocarcinomas have cancers that progress without producing high- or increasing blood levels of PSA. In these patients, who are termed asymptomatic, the PSA test often returns false negative test results as the cancer grows without significant PSA changes.

[0011] Benign prostate hypertrophy (BPH), a non-malignant growth of epithelial cells, and prostatitis, caused by an infection of the prostate gland, are diseases of the prostate that are often accompanied by increases in PSA levels, yielding false positives in the PSA test. Both BPH and prostatitis are common in men over 50, with a prevalence rate of 2.7% for men aged 45-49, increasing to at least 24% by the age of 80 years (Ziada et al. (1999) Urology 53(3 Suppl 3D):1-6). Bacterial infection of the prostate can be demonstrated in only about 10% of men with symptoms of chronic prostatitis/chronic pelvic pain syndrome. Bacteria able to be cultured from patients suffering chronic bacterial prostatitis are mainly Gram-negative uropathogens.

[0012] Another condition, known as prostate intraepithelial neoplasia (PIN), may precede prostate cancer by five to ten years. Currently there are no specific diagnostic tests for PIN, although the ability to detect and monitor this potentially pre-cancerous condition would contribute to early detection and enhanced survival rates for prostate cancer.

### Gene Expression Profiling

[0013] Gene expression is the transcription of DNA (deoxyribonucleic acid) into messenger RNA (messenger ribonucleic acid; also referred to as gene transcripts) by RNA polymerase. Up-regulation describes a gene which has been observed to have higher expression (higher RNA levels) in one sample (for example, from cancer tissue) compared to another sample (usually healthy tissue from a control sample). Down-regulation describes a gene which has been observed to have lower expression (lower RNA levels) in one sample (for example, from cancer tissue) compared to another sample (usually healthy tissue from a control sample).

[0014] Differential changes in gene expression underlie the phenotype of prostate cancer, which varies from one patient to another. Such gene expression changes involve cellular pathways that variously affect cellular and tissue morphologies, growth rates, cellular adhesion, responsiveness to androgens and pharmacological blocking agents for androgens, and varying metastatic potential. Thus prostate cancer progression involves multiple steps, and may result in progression from a localized indolent cancer state to invasive carcinoma and metastasis. The progression of prostate cancer likely proceeds, as seen for other cancers, via events that include the loss of function of cell regulators such as cancer suppressors, cell cycle and apoptosis regulators, proteins involved in metabolism and stress response, and metastasis related molecules (Abate-Shen et al. Polypeptides Dev. 14(19):2410-34, 2000; Ciocca et al. Cell Stress Chaperones 10(2):86-103, 2005).

[0015] While specific patterns of gene expression have been reported for prostate cancer and a number of candidate genes and pathways likely to be important in individual cases have been identified, these have not met with consistent agreement from study to study (Tomlins et al., Annu. Rev. Pathol. 1:243-71, 2006). Such studies generally involve comparing gene expression patterns of primary carcinomas to adjacent gland tissue used as the normal prostate control tissue, or retrospective analysis of prostate carcinoma tissue samples of known clinical outcome and selecting signature genes that correlate with Gleason scores and survival or mortality to derive a prostate cancer gene expression (GEX) score for predicting the probability of relapse of cancer in individuals (for example; Lapointe et al., Proc. Natl. Acd. Sci. USA; 101, 811-816: 2004; Chudin et al., U.S. Pat. No. 7,914,988).

[0016] Again, there is little agreement or consistency between gene transcript candidates from different studies and one result is that diagnostics for prostate cancer based on the gene-based biomarker candidates have yet to have an impact clinically.

[0017] It is likely that one major cause of the inconsistent results from study to study arise from the influence of field effects on the fold change estimates of gene expression when comparing tumor cell RNA levels to adjacent tissues used as healthy control tissues.

[0018] Another reason for inconsistent results appear to arise from processing differences; in the integrity of the tissue samples used as well as the biological heterogeneity of prostate cancers, in platform technologies such as cDNA microarray and RT PCR, and in analytical tools. Formalin fixed paraffin embedded (FFPE) tissues allow a convenient comparison of tumor and adjacent tissues in retrospective studies while many of the cDNA microarray studies have used snap frozen tissues (Bibikova et al., Genomics 89:666-72, 2007; van't Veer et al., Nature 415:530-6, 2002). In addition, some studies have included accident victim donors as controls to overcome potential field effects (Aryee et al. Sci Transl Med 5, 169ra10 2013; Chandran et al. BMC Cancer, 5:45 doi: 10.1186/1471-2407-5-45, 2005).

[0019] Studies have involved hundreds of candidate genes that at the end of such processes yield few that share only a moderate consensus. However, there are a few genes that have been shown to have probable roles in prostate carcinogenesis, including hepsin (HPN; Rhodes et al., Cancer Res. 62:4427-33, 2002), alpha-methylacyl-CoA racemase (AMACR; Rubin et al., JAMA 287:1662-70, 2002; Lin Biosensors 2:377-387, 2012), enhancer of Zeste homolog 2 (EZH2; Varambally et al. Nature, 419:624-9, 2002), L-dopa decarboxylase (DDC; Koutalellis et al. BJU International, 110:E267-E273, 2012), and anterior-gradient 2 (AGR2; Hu et al. Carcinogenesis 33:1178-1186, 2012).

[0020] More recently, bioinformatic approaches employing data from gene expression profiling using microarray technology have generated lists of dysregulated genes in prostate cancer. These studies have also shown few consensus genes (Aryee et al. Sci Transl Med 5, 169ra10, 2013; Chandran et al. BMC Cancer, 5:1471-2407 2005; Pflueger et al. Genome Res. 21:56-67, 2011; Prensner et al. Nature Biotechnology 29:742-749, 2011; Shancheng Ren et al. Cell Research 22:806-821, 2012; Glinsky et al., J. Clin. Invest. 113:913-23, 2004; Hsieh et al, Nature doi:10.1038/Nature.10912, 2012; Lapointe et al, Proc. Natl. Acad. Sci. USA 101:811-6, 2004; LaTulippe et al, Cancer Res. 62:4499-506, 2002; Markert et al, Proc. Natl. Acad. Sci. Doi:10.1073/pnas.1117029108, 2012; Rhodes et al, Cancer Res. 62:4427-33, 2002; Singh et al, Cancer Cell 1:203-9, 2002; Yu et al, J. Clin. Oncol. 22:2790-9, 2004; Varambally et al., Nature 419:624-9, 2002).

### Androgens and Prostate Cancer

[0021] Androgens such as dihydrotestosterone (dHT) and testosterone are the key drivers of prostate cancer. Gene transcription changes that initiate carcinogenesis must arise from the binding of DHT (and testosterone) to the androgen receptor (AR) but have not been exploited widely in prostate cancer gene expression profiling. The AR is a transcription factor and is a member of the nuclear receptor superfamily. The transformation to prostate cancer has been linked to several somatic AR gene mutations and changes in AR protein complex formation, which in turn increase the potential activity of the AR (Wilson Reproduction, fertility, and development, 13:673-8, 2001; Heinlein et al., Endocrine reviews, 25: 276-308, 2004). The AR with co-regulators induces expression of target genes, such as prostate specific antigen (Kallikrein 3) and Kallikrein-related peptidase 2 in prostate (Kim et al., Journal of Cellular Biochemistry, 93:233-41, 2004). The AR activity is also regulated by growth factor cascades which can induce AR modifications, including phosphorylation and acetylation or changes in interactions of the AR with other cofactors. Epidermal growth factor (EGF), Insulin-like growth factor 1 (IGF-1), Interleukin-6 and ligands stimulating the protein kinase A pathways activate the AR by phosphorylation in the absence of androgens either directly or indirectly via the mitogen-activated protein kinase (MAPK) cascade and induce AR gene expression (Culig Growth Factors, 3:179-84, 2004). These growth factors likely also play a role in field effects.

[0022] Androgens also induce rapid activation of kinase-signaling cascades and modulate intracellular calcium levels. These effects are non-genomic as they occur in cells in the presence of inhibitors of transcription and translation, and occur too rapidly to involve transcription (Heinlein et al., Molecular Endocrinology, 16:2181-7, 2002; Lange et al., Annual Review of Physiology: 69:171-199, 2007).

[0023] In response to dHT, the AR interacts with the SH3 domain of tyrosine kinase v-src and viral oncogene homolog (c-src) (Migliaccio et al., EMBO Journal, 19(20):5406-17, 2000) to stimulate the mitogen-activated protein kinase (MAPK) signaling cascade and mitogen-activated protein kinase 1 (MAPK1). The AR can also activate the phosphoinositide-3-kinase (PI3K)/AKT kinase pathway in response to natural androgen. Such androgenic activation of PI3K leads to phosphorylation of AKT (Migliaccio et al., EMBO J. 16; 19(20):5406-17, 2000; Sun et al., J. BiologicalCchemistry; 278(44):42992-3000, 2003; Castoria et al., Steroids; 69(8-9):517-22, 2004).

[0024] The interaction between phosphatase and tensin homolog (PTEN) and the AR inhibits the nuclear translocation of AR and promotes its degradation, which results in suppression of AR transactivation and induction of apoptosis (Lin et al., Molecular endocrinology; 18(10):2409-23, 2004; Mulholland et al., Oncogene; 25(3):329-37, 2006).

[0025] In contrast to gene transcript studies, genomic approaches to prostate cancer diagnosis and monitoring have involved DNA sequence changes and methylation, gene fusions, RNA splice variants and RNA editing. Genomic changes identified include the fusion of androgen-regulated genes, including transmembrane protease, serine 2 (TMPRSS2) with members of the erythroblast transformation specific (ETS) DNA transcription factor family (Tomlins et al., Science 310:644-8, 2005, Tomlins, Nature 448: 595-599, 2007). These fusions appear commonly in prostate cancers and have been shown to be prevalent in more aggressive cancers (Attard et al., Oncogene 27:253-63, 2008; Barwick et al. Br. J. Cancer 102:570-576, 2010; Demichelis et al., Oncogene 26:4596-9, 2007; Nam et al., Br. J. Cancer 97:1690-5, 2007). Transcriptional modulation of TMPRSS2-ERG fusions has been shown to be associated with prostate cancer biomarkers and TGF-beta signaling (Brase et al., BMC Cancer 11:507 doi: 10.1186/1471, 2011). In addition to specific gene fusions, a large number of mutational changes, including copy number variants, have been associated with prostate cancer tumors (Berger et al., Nature 470:214-220, 2011; Demichellis et al., Proc. Natl. Acad. Sci. doi:10.1073/pnas.117405109, 2012; Kumar et al., Proc. Natl. Acad. Sci. 108:17087-17092, 2011). Intratumor heterogeneity has also been found which has been suggested to result in underestimation of the degree of tumor heterogeneity (Gerlinger et al., New Eng, J. Med. 66:883-892, 2012). In particular mutations involving the substrate binding cleft of SPOP, which was found in 6-15% of prostate tumors, lacked ETS family gene rearrangements, suggesting that tumors with SPOP mutations define a new class of prostate tumors. Also tumors with SPOP mutations lacked PTEN deletions in primary tumors but not in metastatic tumors (Barbieri et al., Nature Gen. 44:685-689, 2012).

### Field Effects

[0026] In cancer, field effects refer to the occurrence of genetic and biochemical changes in structurally intact cells in histologically normal tissues adjacent to cancerous lesions. First described in the 1950s as field “cancerization”, this was originally based on morphological changes in cells surrounding cancerous lesions but with progress in molecular biology this description of field effects has changed from a histological to a more molecular definition.

[0027] In prostate cancer there are reported rates of up to 90% of prostate glands containing two or more cancerous foci at the time of clinical diagnosis (Andreoiu et al., Human Pathology, 41, no. 6, pp. 781-793, 2010). These multifocal lesions complicate staging of a cancer because individual foci usually display heterogeneity. It has been argued that the Gleason score, which combines the first most common with the second most common grade of dedifferentiation of cells, enhances the accuracy of prognosis (Iczkowski et al., Current Urology Reports, 12, no. 3, pp. 216-222, 2011) but does not account for the causes of the development of multifocality. Different cancerous foci could evolve independently from each other, remain isolated or fuse if they are in close proximity to each other. Alternatively, migratory cells, such as monocytes or lymphocytes attracted by developing cancerous cells, may produce cytokines or other mediators that cause gene expression changes in both cancerous and normal prostate epithelial cells.

[0028] The inflammation associated with the pathogenesis of prostate cancer may result from increased activity of inflammatory cytokines, particularly IL-6. For example, peripheral blood mononuclear cells interacting with cancerous prostate cells increase production of pro-inflammatory cytokines (Salman et al., Biomedicine & Pharmacotherapy 66(5):330-333, 2012). Inflammatory cytokines are likely candidates for driving field effects as they are secreted from cells, diffuse widely and rapidly, and some activate the androgen receptor.

[0029] Gene expression profiles which have been associated with aggressive clinical recurrence of disease after treatment show a clear association with the gene-expression profiles in adjacent normal-appearing tissue (Klein et al., J. Clin. Oncol. 31, 2013 suppl; abstr 5029).

### Adjacent Glandular Tissues

[0030] In many prostate cancer studies of differential gene transcripts, analyses depend on adjacent glandular tissues as “normal” or healthy tissue. However, this practice has certain limitations.

[0031] First, a selection of ‘normal’ glandular tissue based on morphology does not take into account field effects that change levels of expression occurring in these cells that are not visible in their morphology. Most of the tumors that develop in the prostate gland develop from the secretory epithelial cells located next to the lumen of the gland, which enables the rapid spread of molecules secreted by the tumor or migratory immune cells. As tumorigenesis progresses as indicated by the Gleason score, the field effect likely increases because the physical distance to normal tissue will decrease and secretions will reach the ‘normal’ areas more rapidly.

[0032] Second, as tumorigenesis progresses, the cancerous tissue will take up more of the gland and will start spreading, and it will become increasingly difficult to isolate a part of the gland that contains no cancerous tissue. As chances increase to include cancer cells in the ‘normal’ section with increasing Gleason scores, the adjacent glandular samples become less suitable to act as a representative of ‘normal tissue’.

from Single to Multiple Biomarkers

[0033] The basic problem with the PSA test is that it is a one blood protein biomarker test which fails to detect some prostate cancer and is not prognostic, unable to reflect the disease heterogeneity. A single biomarker does not allow tumors of different lethality or aggressiveness to be differentiated so it offers little in terms of selecting treatment options.

[0034] Multiple gene expression biomarkers offer both diagnostic and prognostic value in one test. They reflect multiple gene changes as transcripts and overcome the problem of trying to use genomic or DNA tests such as those for methylation, mutations, deletions and gene fusions alone as biomarkers, which are limited because DNA tests do not reflect usage in cells.

[0035] An altered genome may contain variant point mutations, translocations, fusions and other changes but they might not reside in coding regions of the genome.

[0036] Microarray and RT-qPCR are commonly used as technologies to quantitate gene expression profiles in cancer and healthy tissue samples. Each has drawbacks such as time involved and costs in comparing gene expression levels across different patient samples, as well as requiring complicated normalization methods that may not be suitable for integration into a diagnostic test. Very often these transcripts, for which differential expression is difficult to measure, are the ones with the most diagnostic and/or prognostic value. RT-qPCR only allows limited multiplexing, which causes a rise in cost per RNA biomarker and hence in the overall cost of the diagnostic test.

[0037] A key advance in DNA sequencing is next generation sequencing technologies where billions of independent DNA sequence reads are generated in parallel, with each read derived from a single molecule of DNA. Next Generation Sequencing (NGS) will likely fill a diagnostic need in the field of inheritable disorders where genomic changes are sought, but to date it has not been applied to the diagnostic needs in cancer. There are no commercial tests to date that employ NGS in multiple RNA biomarker expression profiling as a platform for cancer diagnostics and cancer staging.

[0038] The present invention addresses the need for a more accurate prostate cancer primary diagnosis, a better assessment of the risk of spread of primary prostate cancers and the need for new tools for monitoring responses to therapeutic interventions.

### SUMMARY

[0039] The present invention provides methods for determining the presence and progression of a disorder, such as a cancer, for example prostate cancer, in a subject. Such methods involve the clinical application of gene transcript changes as biomarkers for diagnosing disorders such as prostate cancer, together with the use of next generation sequencing (NGS) advances to perform diagnostic tests. The methods and compositions disclosed herein are employed in combination to determine the relative frequency of expression of one or more RNA biomarkers (also referred to as gene transcript biomarkers) specific for the disorder in the tested subject compared to that in healthy controls. Disorders that can be diagnosed and monitored using the methods disclosed herein include, but are not limited to, cancers, such as prostate and breast cancers.

[0040] Determination of the relative frequency of expression of specific combinations of RNA biomarkers using the methods disclosed herein can also be used to determine the type and/or stage of a disorder, and to monitor the progression of a disorder and/or the effectiveness of treatment. In certain embodiments, the disclosed methods determine changes in frequency of expression of RNA biomarkers in order to distinguish between indolent, or insignificant, forms of a cancer (such as prostate cancer), which have a low likelihood of progressing to a lethal disease, and aggressive, or significant, forms of cancer which are life threatening and require treatment. (For a discussion of significant versus insignificant forms of prostate cancer, see Ploussard et al. European Urology 60:291-303, 2011). The disclosed methods can thus be employed to identify subjects at risk of developing metastatic cancer and/or having an increased risk of cancer recurrence. Subjects identified as having aggressive cancer, or being at increased risk of developing metastatic cancer, can be treated using known therapeutic regimens. Such individuals may, or may not, exhibit any of the traditional risk factors for metastatic disease.

[0041] The methods disclosed herein allow the determination of the relative frequency of expression of multiple RNA biomarkers simultaneously. Oligonucleotides specific for multiple biomarkers are amplified individually at the same time to produce a pool of amplicons and a multiplex format is then used to identify and quantify all the amplicons simultaneously using next generation sequencing (NGS). The advantages of this simultaneous sequencing are a reduction in cost and the amount of tissue required, an increase in the level of reproducibility due to less hands-on manipulation, and increased throughput.

[0042] More specifically, the disclosed methods employ oligonucleotides specific for RNA biomarkers identified as being associated with the presence and/or progression of a disorder, such as prostate cancer, at specific steps of a NGS protocol to selectively quantitate cDNAs complementary to the RNA biomarkers and compare their relative frequency of expression between a test subject and healthy donors, thereby determining the presence or absence of the disorder in the test subject as well as defining differences in expression between different stages of the disorder.

[0043] In conventional NGS methodologies for RNA expression analysis (also referred to as RNA-seq), the actual frequency of expression of each transcript is determined for the whole genome. These frequencies can be biased by differences in the efficiency of the cDNA production, large variations in abundance and size of the transcript, subsequent PCR amplification steps for each transcript, and magnitude of depth of sequencing experiment (Tarazona et al., Genome Research, 21:2213-2223, 2011).

[0044] Determining the relative changes in frequency of expression of RNA biomarkers specific for prostate cancer allows detection of prostate cancers, distinguishing prostate cancers from benign prostate hypertrophy (BPH) and prostatitis, and detection of prostate cancers in asymptomatic men whose prostate cancer may produce low levels of PSA, with high sensitivity and specificity.

[0045] In one aspect, the present disclosure provides methods for detecting the presence of a disorder in a subject, comprising: (a) determining the relative frequency of expression of a plurality of RNA biomarkers in the biological sample, wherein the frequency of expression is determined using next generation sequencing of an amplicon cDNA library prepared using a plurality of oligonucleotide primers specific for the plurality of RNA biomarkers; and (b) comparing the relative frequency of expression of the plurality of RNA biomarkers in the biological sample with predetermined threshold values, wherein increased or decreased relative frequency of expression of at least two or more of the RNA biomarkers in the biological sample indicates the presence of the disorder in the subject.

[0046] In certain embodiments, the amplicon cDNA library is prepared by: (a) isolating total RNA from the biological sample; (b) generating first strand cDNA from the total RNA using a plurality of first oligonucleotide primers specific for the plurality of RNA biomarkers; (c) synthesizing second strand cDNA to provide double-stranded cDNA; (d) adding at least one sequencing adapter to the double-stranded cDNA; and (e) amplifying the double-stranded cDNA to provide the amplicon cDNA library. In one embodiment, the double-stranded cDNA is amplified by polymerase chain reaction using a plurality of oligonucleotide primer pairs specific for the plurality of RNA biomarkers after step (c) and prior to step (d).

[0047] In an alternative embodiment, the amplicon cDNA library is prepared by: (a) isolating total RNA from the biological sample; (b) preparing first strand cDNA to provide single-stranded cDNA; (c) amplifying the single-stranded cDNA by polymerase chain reaction using a plurality of oligonucleotide primer pairs specific for the plurality of RNA biomarkers to provide amplified double-stranded cDNA; (d) adding at least one sequencing adapter to the amplified double-stranded cDNA; and (e) further amplifying the amplified double-stranded cDNA using primers specific for the at least one sequencing adapter to provide the amplicon cDNA library.

[0048] In certain embodiments, the disorder is prostate cancer and the relative frequency of expression of the plurality of RNA biomarkers is determined using: expression levels of the plurality of RNA biomarkers in an adjacent prostate gland sample from the test subject; expression levels of the plurality of RNA biomarkers in a prostate gland sample from a different, healthy, subject; expression levels of the plurality of RNA biomarkers in a sample of prostatectomy gland tissue from a prostatectomy sample that did not show primary tumors upon histological examination; a reference standard established using expression levels of the plurality of RNA biomarkers in a plurality of adjacent prostate gland samples obtained from a plurality of different subjects with the same Gleason scores as the test subject; a reference standard established using expression levels of the plurality of RNA biomarkers in a plurality of adjacent prostate gland samples obtained from a plurality of different subjects with different Gleason scores from the subject; and/or a reference standard established using expression levels of the plurality of RNA biomarkers in a sample of normal human epithelial cells.

[0049] In another aspect, the present disclosure provides method for monitoring progression of a disorder in a subject, comprising: (a) determining the relative frequency of expression of a plurality of RNA biomarkers simultaneously in a first biological sample obtained from the subject at a first time point, and determining the relative frequency of expression of the plurality of RNA biomarkers simultaneously in a second biological sample obtained from the subject at a second, subsequent, time point, wherein the relative frequency of expression is determined using next generation sequencing of an amplicon cDNA library prepared using a plurality of oligonucleotide primers specific for the plurality of RNA biomarkers; and (b) comparing the relative frequency of expression of the plurality of RNA biomarkers in the first and second biological samples with a predetermined threshold value, wherein an increase or decrease in the relative frequency of expression of the plurality of RNA biomarkers in the biological sample at the second time point compared to the relative frequency of expression of the plurality of RNA biomarkers at the first time point indicates progression of the disorder in the subject. The amplicon cDNA library is prepared and the relative frequency expression is determined as described above.

[0050] In yet another aspect, methods for identifying a subject at risk of developing metastatic cancer or at risk of cancer recurrence, are provided, such methods comprising: (a) determining the relative frequency of expression of a plurality of RNA biomarkers simultaneously in a biological sample obtained from the subject, wherein the frequency of expression is determined using next generation sequencing of an amplicon cDNA library prepared using a plurality of oligonucleotide primers specific for the plurality of RNA biomarkers; and (b) comparing the relative frequency of expression of the plurality of RNA biomarkers in the biological sample with a predetermined threshold value, wherein increased or decreased relative frequency of expression of at least two of the plurality of RNA biomarkers in the biological sample relative to the predetermined threshold value indicates that the subject is at risk of developing metastatic cancer or at risk of cancer recurrence. Again, the amplicon cDNA library is prepared and the relative frequency expression is determined as described above.

[0051] In a further aspect, methods for detecting the presence of prostate cancer in a subject are provided that comprise: (a) determining the relative frequency of expression of a plurality of RNA biomarkers simultaneously in a biological sample obtained from the subject, wherein the plurality of RNA biomarkers is selected from the group consisting of: RNA sequences corresponding to DNA sequences provided in SEQ ID NO: 1-75, 235-292, 327-351, 418 and 419, and wherein the frequency of expression is determined using next generation sequencing of an amplicon cDNA library prepared using a plurality of oligonucleotide primers specific for the plurality of RNA biomarkers; (b) comparing the relative frequency of expression of the plurality of RNA biomarkers in the biological sample with a predetermined threshold value; and (c) determining the presence of prostate cancer if there is an increased or decreased relative frequency of expression of at least one RNA biomarker corresponding to a DNA sequence selected from the group consisting of SEQ ID NO: 1-71, 235-287, 327-340, 343-351, 418 and 419 compared to the predetermined threshold value.

[0052] In a related aspect, the present disclosure provides methods for monitoring progression of prostate cancer in a subject, comprising: (a) determining the relative frequency of expression of a plurality of RNA biomarkers simultaneously in a biological sample obtained from the subject at a first time point, and determining the relative frequency of expression of the plurality of RNA biomarkers simultaneously in a biological sample obtained from the subject at a second, subsequent, time point, wherein the plurality of RNA biomarkers is selected from the group consisting of: RNA sequences corresponding to DNA sequences provided in SEQ ID NO: 1-75, 235-292, 327-351, 418 and 419, and wherein the relative frequency of expression is determined using next generation sequencing of an amplicon cDNA library prepared using a plurality of oligonucleotide primers specific for the plurality of RNA biomarkers; (b) comparing the relative frequency of expression of the plurality of RNA biomarkers in the biological sample with a predetermined threshold value; and (c) determining the progression of prostate cancer in the subject if the relative frequency of expression of at least one RNA biomarker corresponding to a DNA sequence selected from the group consisting of SEQ ID NO: 1-71, 235-287, 327-340, 343-351, 418 and 419 is increased or decreased at the second time point compared to the relative frequency of expression of the RNA biomarker at the first time point.

[0053] In yet a further aspect, the present disclosure provides methods for predicting a likelihood of the presence of prostate cancer in a test subject that comprise: (a) measuring the expression levels of a plurality of RNA biomarkers in a biological sample obtained from the subject, wherein the plurality of RNA biomarkers comprises at least three RNA biomarkers selected from the group consisting of: RNA sequences corresponding to DNA sequences provided in SEQ ID NO: 1-75, 235-292, 327-351, 418 and 419; (b) comparing the expression level of each of the plurality of RNA biomarkers in the biological sample with a predetermined reference standard for the RNA biomarker; and (c) predicting the likelihood of the presence of prostate cancer in the subject based on a comparison of the expression level of each of the plurality of RNA biomarkers with the predetermined reference standard for the RNA biomarker. In certain embodiments, expression levels of the plurality of RNA biomarkers that are above or below the predetermined reference standards are indicative of the presence of prostate cancer in the subject. In specific embodiments, the plurality of RNA biomarkers comprises, or consists of, at least three (for example, three, four, five, six, seven or more) RNA biomarkers corresponding to DNA sequences selected from the group consisting of: (i) SEQ ID NO: 41 (PSMA), SEQ ID NO: 49 (TDRD1), SEQ ID NO: 241 (C1orf64), SEQ ID NO: 248 (CST4), and SEQ ID NO: 261 (PCA3); (ii) SEQ ID NO: 1 (ADM), SEQ ID NO: 7 (C15orf48), SEQ ID NO: 25 (KLK3), SEQ ID NO: 39 (PLA2G7), SEQ ID NO: 44 (SLC10A7), SEQ ID NO: 51 (TMC5), SEQ ID NO: 57 (AZGP1), SEQ ID NO: 235 (ACSM3), and SEQ ID NO: 248 (CST4); (iii) SEQ ID NO: 1 (ADM), SEQ ID NO: 7 (C15orf48), SEQ ID NO: 11 (ETV4), SEQ ID NO: 49 (TDRD1), SEQ ID NO: 51 (TMC5), SEQ ID NO: 57 (AZGP1), and SEQ ID NO: 254 (GPR116); or (iv) SEQ ID NO: 8 (CRISP3), SEQ ID NO: 12 (F5), SEQ ID NO: 22 (HPN), SEQ ID NO: 35 (PEX10), SEQ ID NO: 39 (PLA2G7), SEQ ID NO: 44 (SLC10A7), SEQ ID NO: 59 (CSRP1), SEQ ID NO: 248 (CST4), SEQ ID NO: 254 (GPR116), SEQ ID NO: 261 (PCA3), and SEQ ID NO: 286 (SLC22A17).

[0054] In a related aspect, methods for generating a prostate cancer differential expression profile for a subject are provided that comprise: (a) measuring expression levels of a plurality of RNA biomarkers in a biological sample obtained from the subject, wherein the plurality of RNA biomarkers comprises at least three RNA biomarkers selected from the group consisting of: RNA sequences corresponding to DNA sequences provided in SEQ ID NO: 1-75, 235-292, 327-351, 418 and 419; (b) determining whether expression of each of the plurality of RNA biomarkers in the biological sample is up-regulated or down-regulated relative to a predetermined reference standard for each of the plurality of RNA biomarkers; and (c) generating a prostate cancer differential expression profile for the test subject. In certain embodiments, the prostate cancer differential expression profile is generated, or provided, in a format selected from the group consisting of: a database, an electronic display, a paper report, a text document, a graphic display and a digital format.

[0055] Biological samples that can be effectively employed in the disclosed methods include, but are not limited to, urine, blood, serum, cell lines, peripheral blood mononuclear cells (PBMCs), biopsy tissue and prostatectomy tissue.

[0056] In certain embodiments, the disclosed methods comprise determining the expression level of a plurality of RNA biomarkers corresponding to a plurality of polynucleotide biomarkers selected from the group consisting of those listed in Tables 1, 2, 3 and 4. Panels and kits comprising a plurality (for example, two, three, four, five, six, seven, eight, nine, ten or more) of such isolated RNA biomarkers are also provided.

[0057] Oligonucleotide primers that can be employed in the methods disclosed herein include, but are not limited to, those provided in SEQ ID NO: 76-232, 293-326 and 352-417. In certain embodiments, the methods disclosed herein include detecting the relative frequency of expression of a RNA biomarker comprising an RNA sequence that corresponds to a DNA sequence of SEQ ID NO: 1-75, 235-287, 327-351, 418 and 419 or a variant thereof, as defined herein. Those of skill in the art will appreciate that the RNA sequences for the disclosed RNA biomarkers are identical to the cDNA sequences disclosed herein except for the substitution of thymine (T) residues with uracil (U) residues.

[0058] In a further aspect, the present disclosure provides an oligonucleotide primer comprising, or consisting of, a sequence selected from the group consisting of SEQ ID NO: 76-232, 293-326 and 352-417, and variants thereof. In certain embodiments, such oligonucleotide primers have a length equal to or less than 30 nucleotides. In addition to being effective in the diagnostic methods disclosed herein, the disclosed oligonucleotide primers can be effectively employed in other methods for diagnosing the presence of, and/or monitoring the progression of, prostate cancer that are well known to those of skill in the art, including quantitative real time PCR and small scale oligonucleotide microarrays.

[0059] In a related aspect, the present disclosure provides panels and kits containing a plurality (for example at least two, three, four, five or more) of the oligonucleotide primers disclosed herein. Such panels and kits can be effectively employed in the diagnosis, prognosis and monitoring of prostate cancers. In certain embodiments, the disclosed panels and kits further include at least one oligonucleotide primer that is specific for a reference gene. Examples of reference genes and their corresponding primers are provided in Table 3 below. The oligonucleotide primers included in the disclosed kits can be packaged individually in vials, in combination in containers and/or in multi-container units. Such kits can be advantageously used for carrying out the methods disclosed herein and optionally include instructions for the use of the oligonucleotide primers, for example in the disclosed methods, and/or a device for obtaining or providing a biological sample.

[0060] In yet a further aspect, methods for establishing a reference standard for a biomarker for use in diagnosis, prognosis and/or monitoring of prostate cancer in a subject are provided, the methods comprising determining the expression level of the biomarker in at least one biological sample selected from the group consisting of: (a) an adjacent prostate gland sample obtained from the test subject; (b) a plurality of prostate gland samples from different, healthy subjects; (c) a plurality of samples of prostatectomy gland tissue from prostatectomy samples that did not show primary tumors upon histological examination; (d) a plurality of adjacent prostate gland samples obtained from a plurality of different subjects with the same Gleason scores as the test subject; (e) a plurality of adjacent prostate gland samples obtained from a plurality of different subjects with different Gleason scores from the test subject; and (f) a sample of normal human epithelial cells.

[0061] In one embodiment, methods for establishing a reference standard for a RNA biomarker for use in diagnosing the presence of prostate cancer in a test subject are provided that comprise: (a) measuring the expression level of the RNA biomarker in at least two (for example, two, three, four, five, six or more) biological samples selected from the group consisting of: (i) prostate gland samples obtained from different, healthy, subjects; (ii) prostatectomy gland tissue from prostatectomy samples that do not show primary tumors upon histological examination; (iii) adjacent prostate gland samples obtained from different subjects with the same Gleason scores as the test subject; and (iv) adjacent prostate gland samples obtained from different subjects with different Gleason scores from the test subject; (b) determining the mean and the standard deviation of the expression level in the at least one biological sample; and (c) determining a lower end of a normal range of expression of the biomarker as the mean minus two standard deviations, and determining an upper end of a normal range of expression of the biomarker as the mean plus two standard deviations, thereby establishing the reference standard. Methods for determining whether a biomarker is differentially expressed in a biological sample obtained from a test subject that employ reference standards established using such methods are also provided.

### BRIEF DESCRIPTION OF THE DRAWINGS

[0062] FIG. 1 shows four adaptations to conventional NGS technology that are employed in the disclosed methods.

[0063] FIG. 2 shows the independent filtering function plot used by DESeq2 allowing identification of lowest expressed genes across all samples that show no significant p-value.

[0064] FIG. 3 shows the differential expression profile of RNA biomarkers from the comparison of subject's tumor with a Gleason score of 5 (3+2) versus the subject's own adjacent gland: Up-regulation in black, down-regulation in grey and no differential expression in white.

[0065] FIG. 4 shows the establishment of a reference standard.

[0066] FIG. 5 shows the comparison of primary tumor (PT) samples to a reference standard (R).

[0067] FIGS. 6A and 6B show the differential expression profile of RNA biomarkers from the comparison of a subject's adjacent gland (FIG. 6A) and tumor with a Gleason score of 5 (4+3) (FIG. 6B) versus the reference standard (Rv1): Up-regulation in black, down-regulation in grey and no differential expression in white.

### DEFINITIONS

[0068] As used herein, the term “biomarker” refers to a molecule that is associated either quantitatively or qualitatively with a biological change. Examples of biomarkers include polypeptides, proteins, fragments of a polypeptide or protein; polynucleotides, such as a gene product, RNA or RNA fragment; and other body metabolites.

[0069] As used herein, the term “RNA biomarker” or “gene transcript biomarker” refers to a RNA molecule produced by transcription of a gene that is associated either quantitatively or qualitatively with a biological change.

[0070] As used herein the term “RNA sequence corresponding to a DNA sequence” refers to a sequence that is identical to the DNA sequence except for the substitution of all thymine (T) residues with uracil (U) residues.

[0071] As used herein, the term “oligonucleotide specific for a biomarker” refers to an oligonucleotide that specifically hybridizes to a polynucleotide biomarker (such as an RNA biomarker) or a polynucleotide encoding a polypeptide biomarker, and that does not significantly hybridize to unrelated polynucleotides. In certain embodiments, the oligonucleotide hybridizes to a gene, a gene fragment or a gene transcript. In specific embodiments, the oligonucleotide hybridizes to the polynucleotide of interest under stringent conditions, such as, but not limited to, prewashing in a solution of 6×SSC, 0.2% SDS; hybridizing at 65° C., 6×SSC, 0.2% SDS overnight; followed by two washes of 30 minutes each in 1×SSC, 0.1% SDS at 65° C. and two washes of 30 minutes each in 0.2×SSC, 0.1% SDS at 65° C.

[0072] As used herein the term “oligonucleotide primer pair” refers to a pair of oligonucleotide primers that span an intron in the cognate gene transcript biomarker.

[0073] As used, herein the term “polynucleotide(s),” refers to a single or double-stranded polymer of deoxyribonucleotide or ribonucleotide bases and includes deoxyribonucleic acid (DNA) and corresponding ribonucleic acid (RNA) molecules, including hnRNA, mRNA and non-coding RNA molecules, both sense and anti-sense strands, and includes cDNA, genomic DNA and recombinant DNA, as well as wholly or partially synthesized polynucleotides. An hnRNA molecule contains introns and corresponds to a DNA molecule in a generally one-to-one manner. An mRNA molecule corresponds to an hnRNA and DNA molecule from which the introns have been excised. A non-coding RNA is a functional RNA molecule that is not translated into a protein, although in some circumstances non-coding RNA can be coding and vice versa.

[0074] As used herein, the term “amplicon” refers to pieces of DNA that have been synthesized using amplification techniques such as, but not limited to, polymerase chain reaction (PCR).

[0075] As used herein, the term “subject” refers to a mammal, preferably a human, who may or may not have a disorder of interest, such as prostate cancer. Typically, the terms “subject” and “patient” are used interchangeably herein in reference to a human subject.

[0076] As used herein, the term “healthy subject” refers to a subject who is not inflicted with a disorder of interest.

[0077] As used herein in connection with prostate cancer, the term “healthy male” refers to a male who has an undetectable PSA level in serum or non-rising PSA levels up to 1 ng/ml, no evidence of prostate gland abnormality following a DRE and no clinical symptoms of a prostatic disorder.

[0078] As used herein in connection with prostate cancer, the term “asymptomatic male” refers to a male who has a PSA level in serum of greater than 4 ng/ml, which is considered indicative of prostate cancer, but whose DRE is inconclusive and who has no clinical symptoms of disease.

[0079] The term “benign prostate hypertrophy” (BPH) refers to a prostatic disease with a non-malignant growth of epithelial cells in the prostate gland and the term “prostatitis” refers to another prostatic disease of the prostate, usually due to a microbial infection of the prostate gland. Both BPH and prostatitis can result in increased PSA levels.

[0080] As used herein, the term “metastatic prostate cancer” refers to prostate cancer which has spread beyond the prostate gland to a distant site, such as lymph nodes or bone.

[0081] As used herein, the term “indolent cancer” or “insignificant cancer” refers to a cancer that is unlikely to progress to clinical significance in the absence of treatment. Such cancers are generally low-grade, small-volume and organ-confined.

[0082] As used herein the term “aggressive cancer” or “significant cancer” refers to a cancer that is likely to progress to clinical significance, including metastatic disease and ultimately death, in the absence of treatment.

[0083] As used herein, the term “watchful waiting” refers to monitoring of a patient's condition without giving any treatment until symptoms appear or change. Watchful waiting is typically employed with patients who have an indolent cancer.

[0084] As used herein, the term “biopsy tissue” refers to a sample of tissue (e.g., prostate tissue) that is removed from a subject for the purpose of determining if the sample contains cancerous tissue. The biopsy tissue is then examined (e.g., by microscopy) for the presence or absence of cancer.

[0085] As used herein, the term “prostatectomy” refers to the surgical removal of the prostate gland.

[0086] The term “sample” as used herein refers to a sample, specimen or culture obtained from any source. Biological samples include blood products (such as plasma, serum and whole blood), urine, saliva and the like. Biological samples also include tissue samples, such as biopsy tissues or pathological tissues that have previously been fixed (e.g., formalin, snap frozen, cytological processing, etc.).

[0087] As used herein, the term “predetermined threshold value” of expression of a gene transcript biomarker, or RNA biomarker, refers to the level of expression of the same biomarker in: (a) one or more corresponding control/normal samples obtained from the same subject; (b) one or more control/normal samples obtained from normal, or healthy, subjects, e.g. from males who do not have prostate cancer; or (c) a corresponding reference standard.

[0088] As used herein, the term “altered frequency of expression” of a gene transcript in a test biological sample refers to a frequency that is either below or above the predetermined threshold value of expression for the same gene transcript in a control sample and thus encompasses either high (increased) or low (decreased) expression levels.

[0089] As used herein, the term “relative frequency of expression” or “differential expression profile” refers to the frequency of expression of a gene transcript biomarker or RNA biomarker in a test biological sample relative to the frequency of expression of the same biomarker in a corresponding reference standard, a control/normal sample or a group of control/normal samples obtained either from the same subject or from normal, or healthy, subjects, (e.g., from males who do not have prostate cancer).

[0090] As used herein, the term “prognosis” or “providing a prognosis” for a disorder, such as prostate cancer, refers to providing information regarding the likely impact of the presence of prostate cancer (e.g., as determined by the diagnostic methods disclosed herein) on a subject's future health (e.g., the risk of metastasis).

[0091] As used herein, the term “adjacent prostate gland sample” refers to a prostate gland sample that is located adjacent to a prostate cancer lesion and that is believed to be non-cancerous based on histological examination.

[0092] The Gleason Grading system is a system of grading prostate tumor based on its microscopic appearance that is used to help evaluate the prognosis of men with prostate cancer. Gleason scores comprise grades of the two most common tumor patterns in a prostate tumor sample.

### DETAILED DESCRIPTION

[0093] As outlined above, the present disclosure provides methods for detecting the presence or absence of a disorder, for example a cancer such as prostate cancer, in a subject, determining the stage of the disorder and/or the phenotype of the disorder, monitoring progression of the disorder, and/or monitoring treatment of the disorder by determining the frequency of expression of specific gene transcript biomarkers, or RNA biomarkers, in a biological sample obtained from the subject. The methods disclosed herein employ one or more modifications of standard NGS protocols. The disclosed methods employ oligonucleotides specific for multiple gene transcript biomarkers in combination with NGS technology to perform parallel amplicon synthesis and sequencing, and thereby determine the relative frequency of expression of the gene transcript biomarkers in a sample. Such methods have significant advantages over other technologies typically employed to determine expression levels of polynucleotide biomarkers, including improved accuracy, reproducibility and throughput, and can be employed to accurately and simultaneously determine the frequency of expression of a multitude of gene transcript biomarkers across a large number of samples.

[0094] In specific embodiments, such methods use oligonucleotides specific for one or more biomarkers selected from those shown in Tables 1, 2 and 4. In certain embodiments, such methods further employ one or more reference genes selected from those shown in Table 3.

[0095] In one embodiment, the disclosed methods comprise determining the relative frequency of expression levels of at least two, three, four, five, six, seven, eight, nine, ten or more gene transcript biomarkers, or RNA biomarkers, selected from the group consisting of: SEQ ID NO: 1-75, 235-292, 327-351, 418 and 419 in a biological sample taken from a subject, and comparing the relative frequency of expression of the biomarkers with predetermined threshold values.

[0096] The disclosed methods can be employed to diagnose the presence of prostate cancer in asymptomatic subjects; subjects with early stage prostate cancer; subjects who have had surgery to remove the prostate (radical prostatectomy); subjects who have had radiation treatment for prostate cancer; subjects who are undergoing, or have completed, androgen ablation therapy; subjects who have become resistant to hormone ablation therapy; and/or subjects who are undergoing, or have had, chemotherapy.

[0097] In certain embodiments, the gene transcript biomarkers disclosed herein appear in subjects with prostate cancer at levels that are at least two and a half log₂ fold higher or lower than, or at least two standard deviations above or below, the mean level in a reference standard.

[0098] In one embodiment, the up- or down-regulation of one RNA biomarker may be associated with the up- or down-regulation of a specific set of two or more RNA biomarkers indicative of a specific activation state of the androgen receptor.

[0099] All of the biomarkers and oligonucleotides disclosed herein are isolated and purified, as those terms are commonly used in the art. Preferably, the biomarkers and oligonucleotides are at least about 80% pure, more preferably at least about 90% pure, and most preferably at least about 99% pure.

[0100] In certain embodiments, the oligonucleotides employed in the disclosed methods specifically hybridize to a variant of a polynucleotide biomarker disclosed herein. As used herein, the term “variant” comprehends nucleotide or amino acid sequences different from the specifically identified sequences, wherein one or more nucleotides or amino acid residues is deleted, substituted, or added. Variants may be naturally occurring allelic variants, or non-naturally occurring variants. Variant sequences (polynucleotide or polypeptide) preferably exhibit at least 80%, 85%, 90%, 95%, 96%, 97%, 98% or 99% identity to a sequence disclosed herein. The percentage identity is determined by aligning the two sequences to be compared as described below, determining the number of identical residues in the aligned portion, dividing that number by the total number of residues in the inventive (queried) sequence, and multiplying the result by 100.

[0101] In addition to exhibiting the recited level of sequence identity, variants of the disclosed biomarkers are preferably themselves expressed in subjects with prostate cancer at a frequency that are higher or lower than the levels of expression in normal, healthy individuals.

[0102] Polypeptide and polynucleotide sequences may be aligned, and percentages of identical amino acids or nucleotides in a specified region may be determined against another polypeptide or polynucleotide sequence, using computer algorithms that are publicly available. The percentage identity of a polynucleotide or polypeptide sequence is determined by aligning polynucleotide and polypeptide sequences using appropriate algorithms, such as BLASTN or BLASTP, respectively, set to default parameters; identifying the number of identical nucleic or amino acids over the aligned portions; dividing the number of identical nucleic or amino acids by the total number of nucleic or amino acids of the polynucleotide or polypeptide of the present invention; and then multiplying by 100 to determine the percentage identity.

[0103] Two exemplary algorithms for aligning and identifying the identity of polynucleotide sequences are the BLASTN and FASTA algorithms. The alignment and identity of polypeptide sequences may be examined using the BLASTP algorithm. BLASTX and FASTX algorithms compare nucleotide query sequences translated in all reading frames against polypeptide sequences. The FASTA and FASTX algorithms are described in Pearson and Lipman, Proc. Natl. Acad. Sci. USA 85:2444-2448, 1988; and in Pearson, Methods in Enzymol. 183:63-98, 1990. The FASTA software package is available from the University of Virginia, Charlottesville, Va. 22906-9025. The FASTA algorithm, set to the default parameters described in the documentation and distributed with the algorithm, may be used in the determination of polynucleotide variants. The readme files for FASTA and FASTX Version 2.0x that are distributed with the algorithms describe the use of the algorithms and describe the default parameters.

[0104] The BLASTN software is available on the NCBI anonymous FTP server and is available from the National Center for Biotechnology Information (NCBI), National Library of Medicine, Building 38A, Room 8N₈₀₅, Bethesda, Md. 20894. The BLASTN algorithm Version 2.0.6 [Sep. 10, 1998] and Version 2.0.11 [Jan. 20, 2000] set to the default parameters described in the documentation and distributed with the algorithm, is preferred for use in the determination of variants according to the present invention. The use of the BLAST family of algorithms, including BLASTN, is described at NCBI's website and in the publication of Altschul, et al., “Gapped BLAST and PSI-BLAST: a new generation of protein database search programs,” Nucleic Acids Res. 25:3389-3402, 1997.

[0105] Variant sequences generally differ from the specifically identified sequence only by conservative substitutions, deletions or modifications. As used herein with regards to amino acid sequences, a “conservative substitution” is one in which an amino acid is substituted for another amino acid that has similar properties, such that one skilled in the art of peptide chemistry would expect the secondary structure and hydropathic nature of the polypeptide to be substantially unchanged. In general, the following groups of amino acids represent conservative changes: (1) ala, pro, gly, glu, asp, gln, asn, ser, thr; (2) cys, ser, tyr, thr; (3) val, ile, leu, met, ala, phe; (4) lys, arg, his; and (5) phe, tyr, trp, his. Variants may also, or alternatively, contain other modifications, including the deletion or addition of amino acids that have minimal influence on the antigenic properties, secondary structure and hydropathic nature of the polypeptide. For example, a polypeptide may be conjugated to a signal (or leader) sequence at the N-terminal end of the protein which co-translationally or post-translationally directs transfer of the protein. The polypeptide may also be conjugated to a linker or other sequence for ease of synthesis, purification or identification of the polypeptide (e.g., poly-His), or to enhance binding of the polypeptide to a solid support. For example, a polypeptide may be conjugated to an immunoglobulin Fc region.

[0106] In another embodiment, variant polypeptides are encoded by polynucleotide sequences that hybridize to a disclosed polynucleotide under stringent conditions. Stringent hybridization conditions for determining complementarity include salt conditions of less than about 1 M, more usually less than about 500 mM, and preferably less than about 200 mM. Hybridization temperatures can be as low as 5° C., but are generally greater than about 22° C., more preferably greater than about 30° C., and most preferably greater than about 37° C. Longer DNA fragments may require higher hybridization temperatures for specific hybridization. Since the stringency of hybridization may be affected by other factors such as probe composition, presence of organic solvents and extent of base mismatching, the combination of parameters is more important than the absolute measure of any one alone. An example of “stringent conditions” is prewashing in a solution of 6×SSC, 0.2% SDS; hybridizing at 65° C., 6×SSC, 0.2% SDS overnight; followed by two washes of 30 minutes each in 1×SSC, 0.1% SDS at 65° C. and two washes of 30 minutes each in 0.2×SSC, 0.1% SDS at 65° C.

[0107] The expression levels of one or more gene transcript biomarkers, or RNA biomarkers, in a biological sample can be determined, for example, using one or more oligonucleotides that are specific for the gene transcript or RNA biomarker. RNA is isolated from the biological sample and the frequency of expression of a gene transcript or RNA biomarker of interest is determined as described below using oligonucleotides specific for the gene transcript or RNA biomarker of interest in combination with modified NGS technology.

[0108] In other embodiments, the levels of mRNA corresponding to a biomarker disclosed herein can be detected using oligonucleotides in Southern hybridizations, in situ hybridizations, or quantitative real-time PCR amplification (RT-qPCR). Solid phase substrates, or carriers, that can be effectively employed in such assays are well known to those of skill in the art and include, but are not limited to, microporous membranes constructed, for example, of nitrocellulose, nylon, polyvinylidene difluoride, polyester, cellulose acetate, mixed cellulose esters and polycarbonate. Suitable microporous membranes include, for example, those described in US Patent Application Publication no. US2010/0093557A1. Methods for performing such assays are well known to those of skill in the art.

[0109] The present disclosure further provides methods employing a plurality of oligonucleotides that are specific for a plurality of the prostate cancer gene transcript biomarkers disclosed herein. The oligonucleotides employed in the disclosed methods are generally single-stranded molecules, such as synthetic antisense molecules or cDNA fragments, and are, for example, 6-60 nt, 15-30 nt or 20-25 nt in length.

[0110] Oligonucleotides specific for a polynucleotide, or gene transcript, biomarker disclosed herein are prepared using techniques well known to those of skill in the art. For example, oligonucleotides can be designed using known computer algorithms to identify oligonucleotides of a defined length that are unique to the polynucleotide, have a GC content within a range suitable for hybridization, and lack predicted secondary structure that may interfere with hybridization. Oligonucleotides can be synthesized using methods well known to those in the art. In specific embodiments, the oligonucleotides employed in the disclosed methods and compositions are selected from the group consisting of: SEQ ID NO: 76-232, 293-326 and 352-417.

[0111] For tests involving alterations in RNA expression levels, it is important to ensure adequate standardization. Accordingly, in tests such as the adapted NGS technology disclosed herein, RT-qPCR or small scale oligonucleotide microarrays, at least one reference gene is employed. Reference genes that can be employed in such methods include, but are not limited to, those listed in Table 3 below.

[0112] In one example below, the establishment of a reference standard is described. This approach was developed to approximate the level and normal biological variation of expression of the biomarkers in non-cancerous prostate tissue. The reference standard is built using the most ‘normal’ glandular samples available, including samples from subjects with no confirmed tumor or with low Gleason score tumors (5 and 6).

[0113] In other examples, the differential expression of RNA biomarkers in samples derived from cancerous tissue with a Gleason score of 5 and 6 (referred to herein as Groups I and II) is described by comparison to the reference standard described above, together with the differential expression of RNA biomarkers in samples derived from cancerous tissue with a Gleason score of 3+4 (Group III), 4+3 (Group IV) and 8-10 (Group V). The segregation between Groups I and II on the one hand and Groups III, IV and V on the other reflects the segregation of the tumors into those in which it is unclear whether they will progress or remain indolent (Groups I and II), and those that are highly likely to progress and become life threatening (Groups III, IV and V).

[0114] Also described is a method for relating gene transcript changes to a number of genes closely linked to the androgen receptor. This analytical approach creates a personalized integrative gene network linking the RNA biomarker expression profile of each analyzed subject to the androgen receptor and other key regulators of prostate cancer initiation and development. This integrative analytical method is of clinical relevance as it allows a rapid characterization of the large amount of data generated by NGS sequencing of amplicon libraries from each tissue sample and can serve as an interpretation tool to associate the expression profiles of multiple RNA biomarkers to specific diagnosis and prognosis of prostate cancer.

[0115] The following examples are intended to illustrate, but not limit, this disclosure.

### EXAMPLES

### Materials and Methods

### RNA Extraction

[0116] Archived formalin fixed paraffin embedded (FFPE) prostatectomy tissue was collected from Diagnostic Medical Laboratory NZ Ltd (DML) for Clinical study 1, with permission from donors under the human ethics approval granted by the Southern Health and Disability Ethics Committee (reference 12/STH/62 dated 22 Feb. 2013).

[0117] FFPE blocks were reviewed by a clinical histopathologist, and a tumor and histologically adjacent region deemed “normal” were identified for each subject. These identified areas were then excised and reset in paraffin. Approximately fifteen freshly cut sections at a thickness of ten microns were then processed using a Qiagen RNeasy FFPE kit (Cat No: 74404, 73504) to extract RNA. In all extractions the method used for the deparaffinized step was the original method from Cat No: 74404 kit, and the remainder of the protocol was performed following the manufacturer's instructions.

[0118] RNA purity was assessed on the NanoDrop 2000 spectrophotometer (Thermo Scientific), and the RNA concentration was determined using the Qubit® 2.0 Fluorometer RNA assay kit (Life Technologies). RNA integrity was evaluated using the RNA 6000 NanoAssay for the Agilent Bioanalyser 2100 (Agilent Technologies, Santa Clara, Calif.).

### RNA Biomarker Amplicon Production

[0119] The relative frequency of expression of specific RNA biomarkers was determined using the isolated RNA in one or more of the four methods described below and summarized in FIG. 1. Each of these methods includes at least one modification of conventional NGS technologies. Conventional NGS technologies are well known to those of skill in the art and are described, for example, in Wang et al. (Nat. Rev. Genet. (2009) 10:57-63), and Marguerat and Bahler (Cell. Mol. Life. Sci. (2010) 67:569-579).

### Method 1

[0120] In a first method, sequence specific priming is employed during the generation of first strand cDNA. An optional first step in this method is to deplete the total RNA of rRNA using an industry-provided kit, if necessary. An industry-provided first strand cDNA kit is used to combine total RNA (or rRNA-depleted total RNA) with at least one strand specific oligonucleotide primer (i.e. an oligonucleotide primer specific for the RNA biomarker of interest) and generate first strand cDNA according to the manufacturer's protocol. Second strand cDNA is then synthesized in an unbiased manner using standard techniques. The resulting double-stranded cDNA is fragmented if necessary using standard methods, and the cDNA ends are repaired using standard methods in which any overhangs at the cDNA ends are converted into blunt ends using T4 DNA polymerase. An overhanging adenine (A) base is added to the 3′ end of the blunt DNA fragments by the use of Klenow fragment to assist with ligation of adapters required for the sequencing process. The adapters are ligated to the ends of the cDNA fragments using standard procedures, and then the cDNA fragments are run on a gel for purification and removal of excess adapters. The cDNA is amplified using adapter primers, purified, denatured and further diluted for cluster generation and sequencing, for example on a HiSeq2000 according to Illumina Corporation's standard protocols (208 cycles sequencing program, paired-end with indexing). The cDNA library is sequenced, and the relative frequency of expression of the specific RNA biomarkers in cancer patients and healthy controls is determined.

### Method 2

[0121] As in method 1, sequence specific priming is employed during the generation of first strand cDNA. This is achieved using an industry provided first strand cDNA kit and at least one strand specific oligonucleotide primer to generate first strand cDNA from total RNA (or rRNA depleted total RNA if necessary) according to the manufacturer's protocol. The second strand cDNA can either be prepared in an unbiased manner using standard techniques, or it can be directly amplified using a set of specific oligonucleotide primers (i.e. oligonucleotide primers specific for the RNA biomarkers of interest) to amplify a specific set of PCR amplicons by either primer limited or cycle limited PCR. In preferred embodiments, the oligonucleotide primer employed to generate the first strand cDNA can be the same as one of the pair of oligonucleotide primers used to amplify the double-stranded cDNA. The cDNA is then purified via a cleanup procedure to remove excess PCR reagents. The cDNA is fragmented if necessary using standard methods, and the cDNA ends are repaired using standard methods in which any overhangs at the cDNA ends are converted into blunt ends using T4 DNA polymerase. An overhanging adenine (A) base is added to the 3′ end of the blunt DNA fragments by the use of Klenow fragment to assist with ligation of adapters required for the sequencing process. The adapters are ligated to the ends of the cDNA fragments using standard procedures, and the cDNA fragments are then purified to remove excess adapters. The cDNA is amplified using adapter primers, purified, denatured and further diluted for cluster generation and sequencing, for example on a HiSeq2000 according to Illumina Corporation's standard protocols (208 cycles sequencing program, paired-end with indexing). The cDNA library is sequenced and the relative frequency of expression of the specific RNA biomarkers in cancer patients and healthy controls is determined.

### Method 3

[0122] This method employs total RNA or rRNA-depleted RNA if necessary. The first strand cDNA is synthesized using standard methods. The first strand cDNA is then directly amplified using a set of specific oligonucleotide primers (i.e. oligonucleotide primers specific for the RNA biomarkers of interest) to amplify a specific set of PCR amplicons using either primer limited or cycle limited PCR. The cDNA is purified via a cleanup procedure to remove excess PCR reagents. The cDNA is fragmented if necessary using standard methods, and the cDNA ends are repaired using standard methods, in which any overhangs at the cDNA ends are converted into blunt ends using T4 DNA polymerase. An overhanging adenine (A) base is added to the 3′ end of the blunt DNA fragments by the use of Klenow fragment to assist with ligation of adapters required for the sequencing process. Adapters are ligated to the ends of the cDNA fragments using standard procedures, and the cDNA is purified to remove excess adapters. The cDNA is then amplified using adapter primers and purified. The cDNA can be size selected via gel electrophoresis using standard methods if necessary. The cDNA library is sequenced, and the relative frequency of expression of the specific RNA biomarkers in cancer patients and healthy controls is determined.

### Method 3a

[0123] Method 3a differs from Method 3 in that all sequences necessary for next generation sequencing are incorporated via either a one or two step PCR amplification.

[0124] An optional first step in this method is to deplete the total RNA of rRNA using an industry-provided kit, if necessary. The first strand cDNA is then synthesized using standard methods. The first strand cDNA is directly amplified using a set of specific oligonucleotide primers (i.e. oligonucleotide primers specific for the RNA biomarkers of interest) also containing Next Generation Sequencing (NGS) primer sites, using either primer limited or cycle limited PCR. The cDNA is then purified via a cleanup procedure to remove excess PCR reagents, and re-amplified with another set of primers, if necessary, in order to add further sites required for NGS using either primer limited or cycle limited PCR. The cDNA is then purified to remove excess PCR reagents and, if necessary, is again amplified using adapter primers and purified. The cDNA is then denatured and further diluted for cluster generation and sequencing, for example on a HiSeq2000 according to Illumina Corporation's standard protocols (208 cycles sequencing program, paired-end with indexing). The cDNA library is sequenced, and the relative frequency of expression of the specific RNA biomarkers in cancer patients and healthy controls is determined.

### Identification of Prostate Cancer RNA Biomarkers

[0125] RNA biomarkers were selected using annotation and analysis of publicly available RNA expression profile data in the NCBI databases GSE6919 and GSE38241 as these data-sets include data from cancer free donors. The NCBI database GSE6919, which was developed at the University of Pittsburgh, contains data from three Affymetrix chips (U95A, U95B and U95C), representing more than 36,000 gene reporters. The database, which has been analyzed by Chandran et al. (BMC Cancer 2005, 5:45; BMC Cancer 2007, 9:64), and Yu et al. (J Clin Oncol 2004, 22:2790-2799) contains RNA profiles from more than 200 individual prostate tumor samples, combined with adjacent “normal” or “healthy” tissues, or prostate tissues from individuals believed to be free of prostate cancer.

[0126] The biomarkers shown in Table 1 below form a unique set identified as being over-expressed in subjects with prostate cancer. Similarly, the biomarkers shown in Table 2 form a second unique combination of RNA biomarkers identified as being under-expressed in subjects with prostate cancer.

TABLE 1
RNA Biomarkers with Elevated Expression Levels in Prostate Cancer Patients

| | | | | SEQ | PRIMER | |
|---|---|---|---|---|---|---|
| | GENBANK | | GENE | ID | SEQ ID | PRIMER |
| REPORTER | ACCESSION | GENE DESCRIPTION | SYMBOL | NO: | NOs: | IDs |
| 34777_at | D14874 | Adrenomedullin | ADM | 1 | 76, 77 | ND654, |
| | | | | | | ND655 |
| 38827_at | AF038451 | Anterior gradient 2 | AGR2 | 2 | 78, 79 | ND543, |
| | | homolog | | | | ND544 |
| 37399_at | D17793 | Aldo-keto reductase | AKR1C3 | 3 | 80, 81 | ND498, |
| | | family 1, member C3 | | | | ND499 |
| 41764_at | AA976838 | Apolipoprotein C-I | ApoC1 | 4 | 82, 83 | ND414, |
| | | | | | | ND599 |
| 608_at | M12529 | Apolipoprotein E | ApoE | 5 | 84, 85 | CH350, |
| | | | | | | CH351 |
| 1577_at | M23263 | Androgen receptor | AR | 6 | 86, 87, | ND460, |
| | | | | | 88, 89 | ND461, |
| | | | | | | ND532, |
| | | | | | | ND533 |
| 56999_at | AI625959 | Chromosome 15 open | C15ORF48 | 7 | 90, 91 | CH075, |
| | | reading frame 48 | | | | CH076 |
| 36464_at | X94323 | cysteine-rich secretory | CRISP3 | 8 | 92, 93 | ND536, |
| | | protein 3 | | | | ND537 |
| 40201_at | M76180 | Dopa decarboxylase | DDC | 9 | 94, 95 | CH127, |
| | | | | | | CH128 |
| 37156_at | AF070641 | ets variant gene 1 | ETV1 | 10 | 96, 97 | ND440, |
| | | | | | | ND441 |
| 2084_s_at | D12765 | ets variant gene 4 (E1A | ETV4 | 11 | 98, 99 | ND410, |
| | | enhancer binding | | | | ND411 |
| | | protein, E1AF) | | | | |
| 35245_at | M16967 | F5, Coagulation factor V | F5 | 12 | 100, 101 | ND714, |
| | | | | | | ND715 |
| 36622_at | AI989422 | Fibrinogen | FGG | 13 | 102, 103 | ND442, |
| | | | | | | ND443 |
| 36201_at | D13315 | Glycoxalase 1 | GLO1 | 14 | 104, 105 | CH186, |
| | | | | | | CH187 |
| 39135_at | AB018310 | GRAM domain | GRAMD4 | 15 | 106, 107 | ND484, |
| | | containing 4 | | | | ND589 |
| 48885_at | R61847 | Glutamate receptor, | GRIN3A | 16 | 108, 109 | CH328, |
| | | ionotropic N-methyl-D- | | | | CH329 |
| | | aspartate 3A | | | | |
| 1039_s_at | U22431 | Hypoxia inducible factor | HIF-1A | 17 | 110, 111 | ND700, |
| | | 1, alpha subunit | | | | ND701 |
| 37851_at | AF055019 | Homeodomain | HIPK2 | 18 | 112, 113 | ND612, |
| | | interacting protein | | | | ND613 |
| | | kinase: TF kinase | | | | |
| 32480_at | X07495 | Homeobox C4 | HOXC4 | 19 | 114, 115 | ND422, |
| | | | | | | ND423 |
| 56429_at | AI525822 | Homo sapiens | HN1 | 20 | 116, 117 | ND490, |
| | | hematological and | | | | ND491 |
| | | neurological expressed 1 | | | | |
| 32570_at | L76465 | Hydroxyprostaglandin | HPGD | 21 | 118, 119 | ND528, |
| | | dehydrogenase 15- | | | | ND529 |
| | | (NAD) | | | | |
| 37639_at | X07732 | hepsin (transmembrane | HPN | 22 | 120, 121 | ND595, |
| | | protease, serine 1) | | | | ND596 |
| 63673_at | AI635057 | HSBP1 - Heat shock | HSBP1 | 23 | 122, 123 | ND702, |
| | | protein 27A | | | | 703 |
| 1232_s_at | M74587 | Insulin like growth | IGFBP1 | 24 | 124, 125 | ND608, |
| | | factor binding protein 1 | | | | 609 |
| | | precursor | | | | |
| 1804_at | X07730 | kallikrein-related | KLK3 | 25 | 126, 127, 128, | ND438, |
| | | peptidase 3 | | | 129 | ND439, |
| | | | | | | ND470, |
| | | | | | | ND471 |
| 217_at, | S39329 | kallikrein-related | KLK2 | 26 | 130, 131 | ND418, |
| 41721_at | | peptidase 2 | | | | ND419 |
| 62175_at | AI50156 | Homo sapiens laminin, | LAMA1 | 27 | 132, 133 | ND662, |
| | | alpha 1 | | | | ND663 |
| 60019_at, | AA947309.1 | Leucine rich repeat | LRRN1 | 28 | 134, 135 | ND428, |
| 56912_at | | neuronal 1 - Homo | | | | ND429 |
| | | sapiens leucine-rich | | | | |
| | | repeats and calponin | | | | |
| | | homology (CH) domain | | | | |
| | | containing 4 (LRCH4) | | | | |
| 1083_s_at, | M35093 | Mucin1 cell surface | MUC1 | 29 | 136, 137 | CH284, |
| 927_at | | associated protein | | | | CH285 |
| 52116_at | AI697679 | Myelin expression factor 2 | MYEF2 | 30 | 138, 139 | ND396, |
| | | | | | | ND397 |
| 35024_at | L37362 | OPRK1 receptor | OPRK1 | 31 | 140, 141 | ND404, |
| | | | | | | ND405 |
| 59233_at | W27060 | Homo sapiens SET | SETMAR | 32 | 142, 143 | ND492, |
| | | domain and mariner | | | | ND493 |
| | | transposase fusion gene | | | | |
| | | (SETMAR) transcript | | | | |
| | | variant 3, non-coding | | | | |
| | | RNA | | | | |
| — | — | Homo sapiens | LOC100506990 | 33 | 144, 145 | ND488, |
| | | uncharacterized | | | | ND489 |
| | | LOC100506990, | | | | |
| | | transcript variant 2 non- | | | | |
| | | coding RNA | | | | |
| 51776_s_at, | AI749525, | PDZK1 interacting | PDZK1IP1 | 34 | 146, 147 | ND500, |
| 31610_at, | U21049, | protein 1 | | | | ND501 |
| 59794_g_at | AA872415 | | | | | |
| 41281_s_at | AF060502 | Peroxisomal biogenesis | PEX10 | 35 | 148, 149 | CH139, |
| | | factor 10 | | | | CH140 |
| 40116_at | X16911 | Homo sapiens | PFKL | 36 | 150, 151 | ND708, |
| | | phosphofructokinase, | | | | ND709 |
| | | liver (PFKL) | | | | |
| 39175_at | D25328 | Homo sapiens | PFKP | 37 | 152, 153 | ND696, |
| | | phosphofructokinase, | | | | ND697 |
| | | platelet (PFKP) gene | | | | |
| 41094_at | Y10179 | Prolactin Induced | PIP | 38 | 154, 155 | ND502, |
| | | Protein | | | | ND503, |
| | | | | | | CH268, |
| | | | | | | CH269 |
| 37068_at | U24577 | phospholipase A2, group | PLA2G7 | 39 | 156, 157 | CH212, |
| | | VII (platelet-activating | | | | CH213 |
| | | factor acetylhydrolase, | | | | |
| | | plasma) | | | | |
| 63958_at | AI583077 | prostate stem cell | PSCA | 40 | 158, 159 | ND380, |
| | | antigen | | | | ND381 |
| 1739_at, | M99487 | Prostate-specific | PSMA | 41 | 160, 161 | ND402, |
| 1740_g_at | | membrane antigen | | | | ND403 |
| 33272_at | AA829286 | Serum amyloid A2 | SAA2 | 42 | 162, 163 | CH320, |
| | | | | | | CH321 |
| 36781_at | X01683 | Serpin peptidase | SERPINA1 | 43 | 164, 165 | ND446, |
| | | inhibitor clade A | | | | ND447 |
| 54293_at | N30034 | Solute carrier family 10, | SLC10A7 | 44 | 166, 167 | ND734, |
| | | member 7 | | | | ND735 |
| 39926_at | U59913 | Homo sapiens SMAD | SMAD5 | 45 | 168, 169 | ND710, |
| | | family member 5 | | | | ND711 |
| | | (SMAD5) | | | | |
| 52576_s_at | AW007426 | Spondin 2 extracellular | SPON2 | 46 | 170, 171 | ND358, |
| | | matrix protein | | | | ND359 |
| 34342_s_at | AF052124 | Osteopontin:secreted | SPP1 | 47 | 172, 173 | ND472, |
| | | phophoprotein | | | | ND473 |
| 1938_at | K03218 | Homo sapiens v-src | SRC | 48 | 174, 175 | ND704, |
| | | sarcoma (Schmidt- | | | | ND705 |
| | | Ruppin A-2) viral | | | | |
| | | oncogene homolog | | | | |
| — | — | Homo sapiens tudor | TDRD1 | 49 | 176, 177 | ND726, |
| | | domain containing 1 | | | | ND727 |
| | | (TDRD1) | | | | |
| 32154_at | M36711 | transcription factor AP-2 | TFAP2A | 50 | 178, 179 | ND494, |
| | | alpha (activating | | | | ND495 |
| | | enhancer binding protein | | | | |
| | | 2 alpha) | | | | |
| 47890_at | AI921465 | Homo sapiens | TMC5 | 51 | 180, 181 | ND670, |
| | | transmembrane channel- | | | | 671 |
| | | like 5 (TMC5) | | | | |
| 45574_g_at | AA534688 | TPX2-microtubule | TPX2 | 52 | 182, 183 | ND436, |
| | | associated | | | | ND437 |
| 57239_at | AI439109 | Homo sapiens isolate | TRIB1 | 53 | 184, 185 | ND718, 719 |
| | | TRIB1-VI-T tribbles- | | | | |
| | | like protein 1 | | | | |
| 56508_at | W22687 | Tetraspanin 13 | TSPAN13 | 54 | 186, 187 | ND386, |
| | | | | | | ND387 |
| 6315_f_at | T50788 | UDP | UGT2B15 | 55 | 188, 189 | ND452, |
| | | glucuronosyltransferase | | | | ND453 |
| | | 2 family polypeptide | | | | |
| | | B15 | | | | |
| 33279_at | X80062 | acyl-CoA synthetase | ACSM3 | 235 | 293, 294 | ND632, |
| | | medium-chain family | | | | ND633 |
| | | member 3 | | | | |
| 39314_at | X77533 | Actin A Receptor, type | ACVR2B | 236 | — | |
| | | IIB | | | | |
| 41706_at | AJ130733 | alpha-methylacyl-CoA | AMACR | 237 | 352, 353, | ND800, |
| | | racemase | | | 354, 355 | ND801, |
| | | | | | | ND802, |
| | | | | | | ND803 |
| 35084_at | AC005263 | Anti-Mullerian hormone | AMH | 238 | — | |
| 36106_at | X01388 | Apolipoprotein C-III | ApoCIII | 239 | — | |
| 31355_at | U77629.1 | Achaete-scute complex | ASCL2 | 240 | — | |
| | | homolog 2 | | | | |
| 46188_at | AI422243 | Chromosome 7 open | C7orf68 | 242 | — | |
| | | reading frame 68 | | | | |
| 61650_at | AI820748 | Chromosome 1 open | C1orf64 | 241 | 295, 296 | ND712, |
| | | reading frame 64 | | | | ND713 |
| 37605_at | L10347 | Collagen, type II, alpha 1 | COL2A1 | 243 | — | |
| 39925_at | M95610 | collagen, type IX, alpha 2 | COL9A2 | 244 | — | |
| 40162_s_at | AC003107 | Cartilage Oligomeric | COMP | 245 | — | |
| | | Matrix protein precursor | | | | |
| 45399_at | T77033 | Cysteine-rich secretory | CRISPLD1 | 246 | 297, 298 | ND634, ND635 |
| | | protein LCCL domain | | | | |
| | | containing 1 | | | | |
| 37020_at | X56692 | C-reactive protein | CRP | 247 | — | |
| 35506_s_at | J03870 | Cystatin S | CST4 | 248 | 299, 300 | ND390, |
| | | | | | | ND391 |
| 34623_at | M97925 | Defensin alpha 5, Paneth | DEFA5 | 249 | — | |
| | | cell specific | | | | |
| 52138_at | AI351043, | v-ets erythroblastosis | ERG | 250 | 356, 357, | ND832, |
| | AI351043 | virus E26 oncogene like | | | 358, 359 | ND833, |
| | | (avian) | | | | ND834, |
| | | | | | | ND835 |
| 45394_s_at | AA563933 | Family with sequence | FAM3D | 251 | 301-304 | ND510, |
| | | similarity 3, member D | | | | ND511, |
| | | | | | | CH238, |
| | | | | | | CH239 |
| 31685_at | Y08976 | FEV (ETS oncogene | FEV | 252 | — | |
| | | family) | | | | |
| 35905_s_at | U34995 | Glyceraldehyde-3- | GAPDH | 253 | — | |
| | | phosphate | | | | |
| | | dehydrogenase | | | | |
| 34235_at | AB018301 | Homo sapiens G-protein | GPR116 | 254 | 305, 306 | ND660, |
| | | coupled receptor | | | | ND661 |
| | | GPR116 | | | | |
| 32430_at | M73481 | Gastrin releasing peptide | GRPR | 255 | — | |
| | | receptor | | | | |
| 40327_at | U57052 | homeo box B13 | HOXB13 | 256 | — | |
| 36227_at | AF043129 | Interleukin 7 receptor | IL7R | 257 | — | |
| 46958_at | AI868421 | Potassium voltage gated | KCNC2 | 258 | — | |
| | | channel, Shaw-related | | | | |
| | | subfamily, member 2 | | | | |
| 33606_g_at | AF019415 | NK2 homeobox | NKX2-2 | 259 | — | |
| 60501_s_at | AA573803 | Homo sapiens OUT | OTUD5 | 260 | — | |
| | | domain containing 5 | | | | |
| | | (OTUD5) | | | | |
| — | — | Homo sapiens prostate | PCA3 | 261 | 307, 308 | ND171, |
| | | cancer antigen 3 | | | | ND174 |
| | | NR_0153432.1 | | | | |
| 33703_f_at, | L05144 | Phophoenol pyruvate | PCK1 | 262 | — | |
| 33702_f_at | | carboxy kinase I | | | | |
| 39696_at | AB028974 | Paternally expressed 10 | PEG10 | 263 | — | |
| 58941_at | AI765967 | Phospholipase A1 | PLA1A | 264 | — | |
| 62240_at | AI096692 | Proline rich 16 | PRR16 | 265 | — | |
| 33259_at | M81652 | Semenogelin II | SEMG2 | 266 | 309, 310 | ND474, |
| | | | | | | ND475 |
| 928_at | L02785 | Solute carrier 26, | SLC26A3 | 267 | — | |
| | | member 3 | | | | |
| 51847_at | AA001450 | Solute carrier family 44, | SLC44A5 | 268 | 311, 312 | ND360, |
| | | member 5 | | | | ND361 |
| 35716_at | AB008164 | Sulfotransferase | SULT1C2 | 269 | 313, 314 | ND476, |
| | | | | | | ND477 |
| 37898_r_at | AI985964 | Trefoil factor 3 | TFF3 | 270 | — | |
| 40328_at | X99268 | TWIST homolog 1 | TWIST1 | 271 | — | |
| 1651_at | U73379 | Ubiquitin-conjugating | UBE2C | 272 | — | |
| | | enzyme E2C | | | | |
| 44403_at | AI873501 | Clone HH0011_E05 | | 273 | — | |
| | | mRNA sequence | | | | |
| 40375_at | X63741.1 | Early growth response 3 | EGR3 | 327 | 360, 361 | ND676, |
| | | | | | | ND677 |
| 34936_at | AB012130 | Solute carrier family 4, | SLC4A7 | 328 | 362, 363 | ND666, |
| | | sodium biocarbonate co- | | | | ND667 |
| | | transporter, member 7 | | | | |
| 38473_at | M63180.1 | Threonyl-tRNA | TARS | 329 | 364, 365 | ND668, |
| | | synthetase | | | | ND669 |
| 43102_g_at | N93788.1, | Vacuolar protein sorting | VPS13B | 330 | 366, 367 | ND672, |
| | AI138355.1 | 13 homolog B | | | | ND673 |
| 60814_at | H65645.1 | Aldo-keto reductase | AKR1C1 | 331 | 368, 369 | ND820, |
| | | family 1, member C1 | | | | ND821 |
| 35482_at | M33375.1 | Aldo-keto reductase | AKR1C4 | 332 | 370, 371 | ND838, |
| | | family 1, member C4 | | | | ND839 |
| 40690_at | X54942.1 | CDC28 protein kinase | CKS2 | 333 | 372, 373 | ND812, |
| | | regulatory subunit 2 | | | | ND813 |
| 37305_at | U61145 | Enhancer of zeste | EZH2 | 334 | 374, 375 | ND818, |
| | | homolog 2 | | | | ND819 |
| 31859_at | J05070 | Matrix metallopeptidase 9 | MMP9 | 335 | 376, 377 | ND814, |
| | | | | | | ND815 |
| 50099_at | AI733116.1 | Membrane spanning 4- | MS4A8 | 336 | 378, 379 | ND664, |
| | | domains, subfamily A | | | | ND665 |
| | | member 88 | | | | |
| 575_s_at | M93036.1 | Epithelial cell adhesion | EPCAM | 337 | 380, 381 | ND898, |
| | | molecule | | | | ND899 |
| — | HQ605084.1 | PCAT1 long non-coding | PCAT1 | 418 | 414, 415 | ND904, |
| | | RNA | | | | ND905 |
| — | HQ605085.1 | PCAT14 long non- | PCAT14 | 419 | 416, 417 | ND906, |
| | | coding RNA | | | | ND907 |

TABLE 2
RNA Biomarkers Showing Reduced Expression Levels in Prostate Cancer Patients

| | | | | SEQ | PRIMER | |
|---|---|---|---|---|---|---|
| | GENBANK | | GENE | ID | SEQ ID | PRIMER |
| REPORTER | ACCESSION | GENE DESCRIPTION | SYMBOL | NO: | NOs | IDs |
| 32200_at | M24902 | acid phosphatase, | ACPP | 56 | 190, 191 | ND496, |
| | | prostate | | | | ND497 |
| 35834_at | X59766 | Alpha-2-glycoprotein 1, | AZGP1 | 57 | 192, 193 | CH161, |
| | | zinc-binding | | | | CH162 |
| 36780_at | M25915 | Clusterin | CLU | 58 | 194, 195 | ND698, |
| | | | | | | ND699 |
| 38700_at | M33146 | Cysteine and glycine- | CSRP1 | 59 | 196, 197, 198, | DR583, |
| | | rich protein 1 | | | 199 | DR584, |
| | | | | | | ND690, |
| | | | | | | ND691 |
| 65988_at | W19285 | Early b-cell factor 3 | EBF3 | 60 | 200, 201 | ND730, |
| | | | | | | ND731 |
| 38422_s_at | U29332 | 4.5 LIM domains | FHL2 | 61 | 202, 203 | DR569, |
| | | | | | | DR570 |
| 32749_s_at | AL050396 | filamin A | FLNA | 62 | 204, 205 | ND624, |
| | | | | | | ND625 |
| 53270_s_at | AW021867 | Homo sapiens mitogen- | MAP3K7 | 63 | 206, 207 | ND682, |
| | | activated protein kinase | | | | ND683 |
| | | kinase kinase 7 | | | | |
| 32149_at | AA532495 | microseminoprotein, | MSMB | 64 | 208, 209 | CH143, |
| | | beta- | | | | CH144 |
| 32847_at | U48959 | Myosin kinase | MYLK | 65 | 210, 211 | DR567, |
| | | | | | | DR568 |
| 33505_at, | AI887421, | Retinoic acid responder | RARRES1 | 66 | 212, 213 | DR575, |
| 1042_at, | U27185, | | | | | DR576 |
| 62940_f_at | AI669229 | | | | | |
| 64449_at | AI810399 | Selenoprotein M | SELM1 | 67 | 214, 215 | DR559, |
| | | | | | | DR560 |
| 32521_at | AF056087 | Secreted frizzled-related | SFRP1 | 68 | 216, 217 | DR555, |
| | | protein 1 | | | | DR556 |
| 39544_at | AB002351 | Synemin | SYNM | 69 | 218, 219 | DR579, |
| | | | | | | DR580 |
| 48039_at | AI634580 | Synaptopodin 2 | SYNPO2 | 70 | 220, 221 | DR737, 738 |
| 32314_g_at | M75165 | Tropomyosin 2 | TPM2 | 71 | 222, 223 | DR565, |
| | | | | | | DR566 |
| 32755_at | X13839 | Actin SM | ACTA2 | 274 | — | |
| 1197_at | D00654 | Actin gamma2 | ACTG2 | 275 | — | |
| 32527_at | AI381790 | Unknown | C10orf116 | 276 | 315, 316 | ND571, |
| | | | | | | ND572 |
| 34203_at | D17408 | Calponin 1, basic, | CNN1 | 277 | 317, 318 | ND553, |
| | | smooth muscle | | | | ND554 |
| 57241_at | AI928870 | Dystrobrevin binding | DBNDD2 | 278 | — | |
| | | protein 1 | | | | |
| 38183_at | U13219 | Forkhead box F1 | FOXF1 | 279 | 319, 320 | DR557, |
| | | | | | | DR558 |
| 33396_at | U12472 | glutathione S-transferase | GSTP1 | 280 | — | |
| | | P1 | | | | |
| 53796_at | AI819282 | Potassium channel | KCNMA1 | 281 | 321, 322 | DR577, |
| | | | | | | DR578 |
| 49502_i_at | AI379607 | Mutated in CRC | MCC | 282 | 323, 324 | DR573, |
| | | | | | | DR574 |
| 767_at, | AF001548, | Myosin, heavy chain 11, | MYH11 | 283, 284 | — | |
| 37407_s_at, | AF013570, | smooth muscle | | | | |
| 773_at, | D10667, | | | | | |
| 774_g_at, | X69292 | | | | | |
| 32582_at | | | | | | |
| 37576_at | U52969 | Purkinje cell protein 4 | PCP4 | 285 | — | |
| 63827_at | AI479999 | Solute carrier family 22, | SLC22A17 | 286 | 325, 326 | DR626, |
| | | member 17 | | | | DR627 |
| 33596_at | AJ001454 | Sparc/osteonectin, cwcv | SPOCK3 | 287 | — | |
| | | and katal like domains | | | | |
| | | proteoglycan (testican) 3 | | | | |
| 33412_at | Z83844 | Lectin, galactoside | LGALS-1 | 338 | 382, 383 | ND694, |
| | | binding soluble 1 | | | | ND695 |
| 42985_r_at | AI493076.1 | Aldo-keto reductase | AKR1C2 | 339 | 384, 385 | ND836, |
| | | family 1, member C2 | | | | ND837 |
| 6442_s_at, | AA628405, | BOC cell adhesion | BOC | 340 | 386, 387 | ND896, |
| 52999_at | AA126704 | associated, oncogene | | | | ND897 |
| | | regulated | | | | |

[0127] For tests measuring the changes in frequency of RNA expression levels, it is essential to ensure adequate standardization. For this reason we have analyzed the NCBI database to identify reporters with the least variation between gene expression profiles, as shown in Table 3 below, in prostate cancer and healthy donor tissues. These reporters form a robust set of RNA reference genes that can be used where appropriate in tests involving quantification of RNA expression, such as in the modified NGS technology described herein.

TABLE 3
Reporters with Least Variation between Gene Expression Profiles

| | | | | SEQ | PRIMER | |
|---|---|---|---|---|---|---|
| | | GENE | GENE | ID | SEQ ID | PRIMER |
| REPORTER | PROBE | SYMBOL | DESCRIPTION | NO: | NOS: | IDs |
| 35184_at | AB011118 | ZFC3H1 | zinc finger, C3H1- | 72 | 224, 225 | ND514, |
| | | | type containing | | | ND515 |
| | | | CCDC131 | | | |
| 31826_at | AB014574 | FKBP15 | FK506 binding | 73 | 226, 227 | ND468, |
| | | | protein 15, 133 kDa | | | ND469 |
| 39811_at | AA402538 | C19orf50 | chromosome 19 open | 74 | 228, 229, 230 | CH35, |
| | | | reading frame 50 | | | CH36, |
| | | | | | | ND505 |
| 33397_at | AL050383 | CDIPT | CDP-diacylglycerol - | 75 | 231, 232 | CH103, |
| | | | inositol 3- | | | CH104 |
| | | | phosphatidyltransferase | | | |
| 36003_at | AJ005698 | PARN | poly(A)-specific | 288 | — | |
| | | | ribonuclease | | | |
| | | | (deadenylation | | | |
| | | | nuclease) | | | |
| 35337_at | AL050254 | FBXO7 | F-box protein 7 | 289 | — | |
| F39020_at | U82938 | SIVA | CD27-binding (Siva) | 290 | — | |
| | | | protein polymerase | | | |
| 36027_at | AA418779 | POLR2F | PDGFA associated | 291 | — | |
| | | | protein 1 | | | |
| 38703_at | AF005050 | DNPEP | Aspartyl | 292 | — | |
| | | | aminopeptidase | | | |
| 66134_f_at | X95404.1 | CFL1 | Cofilin 1 | 341 | 388, 389 | ND844, |
| | | | | | | ND845 |
| 34643_at | M58458.1 | RPS4X | Ribosomal protein | 342 | 390, 391 | ND842, |
| | | | S4, X-lined | | | ND843 |

[0128] Table 4 lists reporters sharing common regulatory pathways with biomarkers listed in Tables 1 and 2.

TABLE 4
Reporters chosen for specific pathways

| | | | | SEQ | PRIMER | |
|---|---|---|---|---|---|---|
| | | GENE | GENE | ID | SEQ ID | PRIMER |
| REPORTER | PROBE | SYMBOL | DESCRIPTION | NO: | NOS: | IDs |
| 1779_s_at | M16750.1 | PIM | pim-1 oncogene | 343 | 392, 393 | ND822, |
| | | | | | | ND823 |
| 38127_at | Z48199 | SDC1 | syndecan 1 | 344 | 394, 395 | ND826, |
| | | | | | | ND827 |
| 1941_at | U33761.1 | SKP2 | S-phase kinase | 345 | 396, 397 | ND828, |
| | | | associated protein 2 | | | ND829 |
| 1542_at | X04571.1 | EGF | Epidermal growth | 346 | 398, 399 | ND868, |
| | | | factor | | | ND869 |
| 37327_at, | X00588 | EGFR | Epidermal growth | 347 | 400, 401 | ND870, |
| 1537_at | | | factor receptor | | | ND871 |
| 267_at, 40139_at | U88966, | MTOR | Mechanistic target | 348 | 402, 403 | ND878, |
| | L34075 | | of rapamycin | | | ND879 |
| 58901_at + 4 | AW021543, | PTEN | Phosphatase and | 349 | 404, 405, | ND872, |
| others | W73720, | | tensin homolog | | 406, 407, | ND873, |
| | U92436 | | | | 408, 409 | ND874, |
| | | | | | | ND875, |
| | | | | | | ND876, |
| | | | | | | ND877 |
| 1939_at, | M22898, | TP53 | Tumor protein p53 | 350 | 410, 411 | ND880, |
| 1974_s_at, | X02469, S6666 | | | | | ND881 |
| 31618_at | | | | | | |
| 589_at | M32313.1 | SRD5A1 | Steriod 5 alpha | 351 | 412, 413 | ND824, |
| | | | reductase, alpha | | | ND825 |
| | | | polypeptide 1 | | | |

[0129] Primers for the production of an RNA biomarker-specific amplicon were created using a multi-step primer design strategy. Specific intron-spanning primers were created to amplify an amplicon of a specific size (89 bp-160 bp) for use in Next Generation Sequencing (NGS).

[0130] The primers were designed using Primer 3 (v. 0.4.0) software and were checked to ensure that certain criteria were met:

[0131] No more than three C's or G's in the last five base pairs;

[0132] No runs (more than three) of G's in either primers;

[0133] No, or limited, self-complementarity or hairpin formation;

[0134] Primer BLAST of the primer set hits the cognate RNA target of the expected size; and

[0135] Consulted AceView for varying transcripts etc.

[0136] In order to use these RNA specific amplicon primer sets for RNA biomarker amplicon sequencing (RBAS) as described herein, nucleotides incorporating sequencing primers were added to the 5′ end of the primers in the first round PCR as described in Table 5 below, and a second set of primers used for a second round of PCR were used to add further sequences containing an index and adapter sequence.

TABLE 5
Specification of the added sequence to the RNA biomarker
specific primer used for the first round PCR for biomarker
specific amplicon generation

| 1st round PCR | |
|---|---|
| Sequence added to forward | ACGACGCTCTTCCGATCT |
| primer 5′ end | (SEQ ID NO: 233) |
| Sequence added to reverse | CGTGTGCTCTTCCGATCT |
| primer 5′ end | (SEQ ID NO: 234) |

[0137] All primers used in the studies described herein were designed by the inventors and supplied by Life Technologies or IDT.

[0138] To determine the specificity and efficiency of the amplification, the RNA biomarker specific primers were first validated by performing real time SYBR green PCR quantification from relevant samples. A five-fold dilution series was used to construct relative standard curves for each primer set to determine PCR efficiency.

[0139] The relative amount of the marker gene in each of the samples tested was determined by comparing the cycle threshold (Ct value: number of PCR cycles required for the SYBR green fluorescent signal to cross the threshold exceeding background level within the exponential growth phase of the amplification curve). A separate PCR run of 32 cycles with no melting curve was set up, so that the amplicons could be electrophoresed on a 2% gel, cleaned up, and sequenced with standard Sanger chemistry using an Applied Biosystems 3130XL DNA sequencer to confirm the target.

### Example 1

### RNA Biomarker Amplicon Sequencing (RBAS) from Human Prostatectomy Tissue

[0140] To generate the RNA biomarker specific amplicons and prepare the amplicon library for each sample analyzed, cDNA prepared from RNA extracted from tumor and adjacent prostate gland tissue samples of each test subject was used separately as a template for eighty-eight individual PCR reactions with specific primer sets (i.e. oligonucleotide primers specific for the RNA biomarkers of interest including targets and references). The cDNA was synthesized from total RNA extracted from FFPE prostatectomy tissue using random hexamer primers for the production of the first strand cDNA using the SuperScript® VILO™ cDNA Synthesis Kit (Life Technologies). Each PCR reaction was mixed, and a duplicate aliquot was taken from each PCR product to create a duplicated amplicon library for each tissue sample. The amplicon libraries were then cleaned up to remove excess PCR reagents using paramagnetic bead technology and assessed for primer contamination and quantified. The Illumina adapter and index sequences were added to each amplicon library individually with a limited cycle PCR. The post adapter addition amplicon libraries were cleaned up to remove excess PCR reagents using paramagnetic beads, assessed to confirm the absence of primer contamination, verified for correct amplification of products and quantified. The cleaned and quantified post adapter addition amplicon libraries were diluted to 4 nM concentration and the libraries to be sequenced in parallel (4 libraries per test subject) were pooled in equimolar concentration to create a sequencing pool. The eighty eight biomarkers were split into 2 panels consisting of 42 biomarkers and 4 references. For each panel, one sequencing pool consisting of the duplicated amplicon libraries from the tumor and corresponding adjacent gland FFPE samples was prepared and diluted to 2 nM ready for sequencing. The 2 nM sequencing pool was denatured and further diluted to 10 pM or lower if necessary (containing 1% pre-denatured PhiX spike), and loaded into the MiSeg™ V2 300 cycle PE kit cartridge or other kits supplied by Illumina for sequencing using the MiSeg™ or the HiSeg™ 2000/HiSeg™ 2500 system if desired. A 101 cycle (single-end with indexing) sequencing program run on the MiSeq™ generates up to 21 million reads, and up to 2.1 GB of data.

[0141] Initial quality assessment of the sequencing run and demultiplexing (assignment of sequence reads to the appropriate test sample from which the library was prepared) was performed using the software provided with the MiSeg™ platform. The quality assessment of the resulting fastq formatted sequence reads acquired for each of the libraries and the biomarkers expression profile for each sample was analyzed using a novel software application developed in-house called D'Cipher. The assignment of the sequence reads to each of the corresponding RNA biomarker reference sequences was performed with the alignment algorithm BWA-MEM using default parameters (Li and Durbin, Bioinformatics, 26:589-95, 2010). The quality of a sample library was assessed by looking at the FASTQC report, the level of unaligned reads and gapped reads present in the libraries, and whether or not reads were aligning to more than one place. Using the BWA-MEM alignment tool, D'Cipher compiled the number of sequence reads aligning to each of the RNA biomarkers represented in the sequenced amplicon libraries, to generate the raw read counts per amplicon from which the differential expression analysis was performed. Different methods can be used for the scaling of the raw read counts aiming to normalize the wide count distribution produced by NGS. In the following examples, the raw read count obtained for each amplicon was scaled (divided) by the geometric mean of the raw read counts of three reference amplicons in the corresponding library. The reference amplicons represent RNA populations known to have low level of variation in expression across different prostate cancer and healthy donor control tissues. The normalized counts for each amplicon obtained by the expression in log₂ of the scaled read count, represent the expression profile of the corresponding RNA biomarkers in the analyzed sample and are used for differential expression analysis. In the differential expression analysis, the fold change represents the difference in normalized counts of an amplicon between compared libraries.

[0142] For weakly expressed genes, we have little to no chance of seeing differential expression, because the low read counts suffer from such high Poisson noise that any biological effect is drowned in the uncertainties from the read counting. To determine which biomarkers had too low counts to reliably test for differential expression, the independent filtering function implemented in the DESeq2 package (available from Bioconductor) was used (Love et al., bioRxiv preprint, 2014). The independent filtering function plots the filter criterion, which is the mean normalized count per biomarker across all samples over the −log₁₀ (p-value) calculated using DESeq2. This filter criterion allowed us to identify the overall lowest expressed genes across all samples that show no significant p-value (see FIG. 2). These genes were considered to have too low counts to reliably test for differential expression. In the tables of the following examples, these genes are indicated with an asterisk (*).

[0143] In the following examples an adjustment for contamination levels was performed. The average contamination level per target per library per RBAS run was obtained by calculating the average number of reads per library that align to screened biomarkers associated with library adapters that were not used in the present run or in the previous run, and dividing this average by the number of targets that were screened for in the RBAS run. All targets in the sample libraries that presented with counts below the average contamination per target per library for that run was considered ‘not detected’.

[0144] The differential expression profiles of an analyzed sample can be defined by the calculated fold changes or by whether or not the expression level is outside of a range deemed to be ‘normal’ and can be visualized onto an interaction network that enables the rapid identification of the specific pathways that were up- or down-regulated in the tested subject (see, for example, FIG. 3).

[0145] In the following examples, the analyzed subjects' samples were divided in five groups according to their respective assigned Gleason score: Group I consists of samples from one subject with a tumor with a Gleason score of 3+2; Group II consists of samples from eight subjects with tumors with a Gleason score of 3+3; Group III consists of samples from four subjects with tumors with a Gleason score of 3+4; Group IV consists of samples from four subjects with tumors with a Gleason score of 4+3; and Group V consists of samples from three subjects with tumors with a total Gleason score of 8, 9 or 10.

### Example 2

### Analysis of Prostate Cancer Tissue Samples Using RNA Biomarker Amplicon Sequencing and Comparison to their Own Glandular Tissue Sample Adjacent to the Cancerous Tissue

[0146] For this example, expression levels obtained in Example 1 through the RNA amplicon sequencing protocol were normalized using the reference genes and adjusted for contamination levels. Prostate cancer tissue samples of subjects from groups I, II, III, IV and V were compared to their own glandular tissue sample adjacent to the cancerous tissue. Biomarkers were selected based on their expression level in the tumor sample when the expression level of the biomarker in the tumor sample was more than 2.5 log₂ fold different from the expression of that biomarker in the adjacent glandular tissue. An example of the differential expression analysis of the tumor to its corresponding adjacent gland sample can be seen in FIG. 3, identifying biomarkers with altered frequency of expression in black for up-regulation and in grey for down-regulation.

[0147] Any biomarker showing a significant log₂ fold change in at least one of the samples was considered to have an altered frequency of expression. By selecting any biomarker that shows a significant difference in expression in at least one subject, we aim to capture the heterogeneity that is apparent in the progression of prostate cancer. In group I, five biomarkers were found to be up-regulated with an expression level that was more than 2.5 log₂ fold higher than the expression level in the adjacent glandular tissue and six biomarkers were found to be down-regulated compared to the adjacent glandular tissue. In group II, seventeen biomarkers were up-regulated and five were down-regulated. Twenty-four biomarkers were found to be both up- and down-regulated within the group. In group III, twenty-six biomarkers were up-regulated and eleven were down-regulated. Five biomarkers were both up- and down-regulated within this group. In group IV, thirty-seven biomarkers were up-regulated and eighteen were down-regulated. Four biomarkers were both up- and down-regulated within this group. This analysis was only conducted for two samples of group V because the adjacent glandular tissue sample for the subject with a tumor with a Gleason score of 4+5 was not available. For the two remaining subjects twelve biomarkers were identified to be up-regulated, seven were down-regulated. A list of these selected biomarkers is given in Tables 6A and B.

### Tables 6a and B: Biomarkers with a Significant Difference in Expression in at Least One Subject when Comparing Tumor to its Adjacent Glandular Tissue

TABLE 6A

| T3 + 2 (n = 1) | | | T3 + 3 (n = 8) | | | T3 + 4 (n = 4) | | |
|---|---|---|---|---|---|---|---|---|
| | | UP/ | | | UP/ | | | UP/ |
| UP | DOWN | DOWN | UP | DOWN | DOWN | UP | DOWN | DOWN |
| FC > 2.5 | FC < −2.5 | FC > \|2.5\| | FC > 2.5 | FC < −2.5 | FC > \|2.5\| | FC > 2.5 | FC < −2.5 | FC > \|2.5\| |
| C15orf48 | GRIN3A* | | ACSM3 | APOC1 | ADM* | ACSM3 | AZGP1 | ETV4* |
| C1orf64 | LRRN1* | | AZGP1 | ETV1 | AGR2 | APOC1 | EBF3* | GRIN3A* |
| EBF3* | OPRK1* | | CRISPLD1 | ETV4* | C15orf48 | APOE | HPGD | MUC1* |
| PCA3 | PIP* | | CST4 | HN1* | C1orf64 | C15orf48 | LAMA1* | PEX10 |
| TDRD1 | SRC | | F5 | RARRES | CRISP3 | C1orf64 | MSMB | TPX2* |
| | TPX2* | | HOXC4 | | DDC* | CRISP3 | OPRK1* | |
| | | | KLK3 | | EBF3* | CRISPLD1 | LOC100506990 | |
| | | | MSMB | | FAM3D | CST4 | PDZK1IP1 | |
| | | | MUC1* | | GPR116 | ETV1 | PIP* | |
| | | | SETMAR | | GRIN3A* | F5 | SAA2 | |
| | | | PDZK1IP1 | | HPN | FGG* | UGT2B15* | |
| | | | PSMA | | LAMA1* | GPR116 | | |
| | | | SAA2 | | LRRN1* | HOXC4 | | |
| | | | SERPINA1 | | MYEF2 | HPN | | |
| | | | SLC10A7 | | OPRK1* | IGFBP1** | | |
| | | | SPON2 | | PCA3 | LRRN1* | | |
| | | | TSPAN13 | | PIP* | PCA3 | | |
| | | | | | PLA2G7 | PLA2G7 | | |
| | | | | | PSCA | PSCA | | |
| | | | | | SFRP1 | PSMA | | |
| | | | | | TDRD1 | SLC10A7 | | |
| | | | | | TMC5 | SPON2 | | |
| | | | | | TPX2* | SPP1 | | |
| | | | | | UGT2B15* | SRC | | |
| | | | | | | TDRD1 | | |
| | | | | | | TMC5 | | |

TABLE 6B

| T4 + 3 (n = 4) | | | T4 + 4, 5 + 5 (n = 2) | | |
|---|---|---|---|---|---|
| | | UP/ | | | UP/ |
| UP | DOWN | DOWN | UP | DOWN | DOWN |
| FC > 2.5 | FC < −2.5 | FC > \|2.5\| | FC > 2.5 | FC < −2.5 | FC > \|2.5\| |

| | | | | |
|---|---|---|---|---|
| ACSM3 | C19orf50 | F5 | C19orf50 | ADM* |
| ADM* | CLU | FAM3D | GLO1 | GRIN3A* |
| AGR2 | CNN1 | SAA2 | HOXC4 | IGFBP1** |
| APOC1 | CSRP1.583 | UGT2B15* | HPGD | OPRK1* |
| C15orf48 | CSRP1.690 | | LAMA1* | LOC100506990 |
| C1orf64 | FLNA | | MYEF2 | PEX10 |
| CRISP3 | HN1* | | PSMA | SERPINA1 |
| CRISPLD1 | HSBP1 | | SPON2 | |
| CST4 | MCC | | SRC | |
| DDC* | MYLK | | TDRD1 | |
| FHL2 | LOC100506990 | | TPX2* | |
| GLO1 | PFKP | | UGT2B15* | |
| GPR116 | PIP* | | | |
| GRAMD4 | SELM | | | |
| GRIN3A* | SERPINA1 | | | |
| HOXC4 | SLC22A17 | | | |
| HPGD | SPON2 | | | |
| HPN | TPM2 | | | |
| LAMA1* | | | | |
| LRRN1* | | | | |
| MUC1* | | | | |
| MYEF2 | | | | |
| OPRK1* | | | | |
| PCA3 | | | | |
| PDZK1IP1 | | | | |
| PEX10 | | | | |
| PLA2G7 | | | | |
| PSCA | | | | |
| PSMA | | | | |
| SLC10A7 | | | | |
| SPP1 | | | | |
| SRC | | | | |
| TDRD1 | | | | |
| TMC5 | | | | |
| TPX2* | | | | |
| TRIB1 | | | | |
| TSPAN13 | | | | |

### Example 3

### Establishment of a Reference Standard and Comparison of Samples from Prostate Cancer Tissue to this Reference Standard Using RBAS

[0149] We designed a strategy to establish a reference standard based on non-cancerous glandular samples. The aim of a reference standard is to approximate the expression levels of the biomarkers in healthy prostate glands and their normal variation, in order to distinguish abnormal expression due to the formation of a prostate cancer tumor. Ideally, a reference standard (R) would be established with the expression levels of the biomarkers in a number of samples derived from ‘healthy’ prostate glands, as these would be representative of the normal expression levels of the biomarkers and their normal biological variation. However, it is very difficult to obtain healthy prostate glands since these are not removed when there is no clinical indication of disease. To obtain the closest approximation of a ‘Healthy’ reference, we established a reference standard based on the most ‘normal’ samples available to us.

[0150] The most ‘normal’ samples available were samples from two subjects for whom a prostatectomy was indicated but upon histological examination no significant tumor was found. From one of these subjects, two independent samples were taken, so in total results from three samples were available. These samples served as a baseline ‘normal’ reference (N) and were used to construct reference standard version 1 (referred to as Rv1). Rv1 was established by calculating the mean of the expression levels per biomarker in the ‘normal’ samples, and the lower and upper ends of the ‘normal’ range were defined by the mean minus or plus two standard deviations respectively. FIG. 4 illustrates the theoretical mean ( x̅) expression levels of exemplified biomarkers x, y, z and their standard deviations (σₓ) used to establish the reference standard. When the expression of a biomarker in one or more normal samples was not detected, the lower end of the range was set to ‘not detected’. FIG. 5 illustrates the comparison of primary tumor (PT) samples to the reference standard (Rv1).

[0151] Next we compared the expression profile of the 88 biomarkers in the adjacent and tumor samples (T) from each subject of Example 2 to expression levels of Rv1. Biomarkers were determined to be differentially expressed in the tumor sample when they fulfilled at least one of the two following criteria:
[0152] 1. The expression level of the biomarker in the tumor sample was more than 2.5 log₂ fold different from the mean expression of that biomarker in Rv1; and
[0153] 2. The expression level of the biomarker in the tumor sample was outside of the ‘normal’ range of the expression level for that biomarker in Rv1.

[0154] An example of the differential expression analysis of the subject's tumor tissue and its adjacent gland sample to the Rv1 is given in FIGS. 6A & 6B. Results for this comparison are based on chosen log₂ fold change thresholds of >2.5 log₂ fold change for up-regulation and <−2.5 log₂ fold change for down-regulation.

[0155] The result of this analysis shows differential expression in biomarkers in the comparison of the tumor versus Rv1 that was not identified in the comparison of the tumor versus the adjacent gland sample. Further investigation showed that, for at least some of these biomarkers, differential expression could be detected in the comparison of the adjacent gland to Rv1. This indicates that differential expression of that biomarker is already detectable in the adjacent gland sample due to possible field effect, and therefore was not detected when the tumor was compared to its own adjacent gland.

[0156] Consequently, the use of a reference standard minimizes the possible influence of a field effect when using a subject's own adjacent gland as a control sample and at the same time provides a range of biological variation for the investigated biomarkers. As such, this reference standard is employed as an alternative control sample to the adjacent non-cancerous glands of the subjects themselves.

[0157] To improve the estimation of the ‘normal’ biological range of expression of a biomarker, we explored the possibility of including other samples in the establishment of a reference standard. The next most ‘normal’ samples available were the adjacent glandular samples from subjects with low Gleason score tumors (3+2 and 3+3). One sample from a subject with a Gleason score of 3+2 and eight samples from subjects with a Gleason score of 3+3 were added to establish reference standard version 2 (Rv2). In these subjects, tumor development is likely to be limited and as such, would have the least field effect on the adjacent non-cancerous glandular tissue. Care was taken to use a sample that was taken from a section that was located in a different part of the prostate gland, again limiting the chance of incorporating field effect into the reference standard. Expression levels for each biomarker were checked for outliers by using the Grubbs' test (Grubbs, Technometrics, 11:1-21, 1969). A maximum of 1 value was removed when it proved to be outlying compared to the results of the other glands included in the reference standard establishment (p<0.05). In 18 of the 88 biomarkers, 1 value was removed because of its high chance of being an outlier. From then onwards, Rv2 was established in the same way as Rv1: the mean of the expression levels per biomarker was calculated for the samples included in the reference standard, and the lower and upper end of the ‘normal’ range were defined by the mean minus or plus two standard deviations, respectively. Differential expression was now only defined as an expression level of a biomarker detected in the tumor that is outside of the normal range of that biomarker in Rv2.

[0158] Next, the samples included in the reference standard were checked for the presence of field effect. This was done by comparing the expression levels of the biomarkers in the gland samples included in Rv2 to Rv1. Biomarkers that showed differential expression either by exceeding the threshold for fold change or by being outside of the normal range were indicated. Those biomarkers that are differentially expressed in the same direction as the differential expression detected in the corresponding tumor versus Rv1 comparison were then considered as being influenced by field effect. In 34 biomarkers, up to five samples of Rv2 presented with a field effect in those particular biomarkers.

[0159] In the establishment of reference standard version 3 (Rv3), this field effect was countered by removing those datapoints from the dataset before outlier removal, calculation of the mean and determination of the ‘normal’ biological range, which was done in the same way as for Rv2.

### Example 4

### Analysis of Group I and II Prostate Cancer Tissue Samples Using RBAS and Comparison to Rv2 and Rv3

[0160] For this example, expression levels obtained as described in Example 1 using the RBAS protocol from eight tumor samples from group II were compared to Rv2 and Rv3 established as per Example 3 above.

[0161] Any biomarker with an expression level outside of the normal biological range of the reference standard in at least one of the samples was considered as having an altered frequency of expression. By selecting any biomarker that shows a significant difference in expression in at least one subject, we aim to capture the heterogeneity that is apparent in the progression of prostate cancer. When comparing to Rv2, twenty-nine biomarkers were found to be up-regulated, seventeen biomarkers showed down-regulation in at least one of the (3+3) tumor samples, and thirteen biomarkers showed significant up-regulation in at least one and down-regulation in at least one other (3+3) sample. A list of these selected biomarkers is given in Table 7A. Table 7B lists the biomarkers selected when comparing the tumor samples of group II to Rv3. In this analysis, thirty biomarkers were found to be up-regulated, of which twenty-eight matched the ones up-regulated when comparing to Rv2; nineteen biomarkers were found to be down-regulated, of which seventeen matched the ones down-regulated when comparing to Rv2; and sixteen biomarkers showed significant up-regulation in at least one sample and down-regulation in at least one other sample, of which thirteen matched the ones selected when comparing to Rv2.

TABLE 7A
Up- and down-regulated biomarkers compared to
Rv2 in at least 1 subject from group I or II

| vs. Reference Std version 2 (Rv2) | | | vs. Reference Std Version 2 (Rv2) | | |
|---|---|---|---|---|---|
| Group I T3 + 2 (n = 1) | | | Group II T3 + 3 (n = 8) | | |
| | | UP/ | | | UP/ |
| | | DOWN | | | DOWN |
| UP | DOWN | x > x̅ + 2σx or | UP | DOWN | x > x̅ + 2σx or |
| x > x̅ + 2σx | x < x̅ − 2σx | x < x̅ − 2σx | x > x̅ + 2σx | x < x̅ − 2σx | x < x̅ − 2σx |

| | | | | |
|---|---|---|---|---|
| KCNMA1 | LRRN1* | ZFC3H1 | CDIPT | ADM* |
| | ACSM3 | ACPP | APOE | C15orf48 |
| | C10orf116 | ACSM3 | CLU | F5 |
| | F5 | AGR2 | CSRP1.583 | FLNA |
| | SLC22A17 | AKR1C3 | CSRP1.690 | GPR116 |
| | | AR.460 | ETV1 | HSBP1 |
| | | AZGP1 | ETV4* | KCNMA1 |
| | | C10orf116 | FAM3D | MCC |
| | | CRISP3 | FHL2 | MYEF2 |
| | | CRISPLD1 | HN1* | SAA2 |
| | | CST4 | LRRN1* | SELM |
| | | DDC* | MYLK | SLC22A17 |
| | | GLO1 | LOC100506990 | SYNPO2 |
| | | GRAMD4 | PEX10 | |
| | | HIF1A | PFKL | |
| | | HIPK2 | SRC | |
| | | HPGD | TPM2 | |
| | | IGFBP1* | | |
| | | KLK3 | | |
| | | PCA3 | | |
| | | PLA2G7 | | |
| | | PSMA | | |
| | | SERPINA1 | | |
| | | SFRP1 | | |
| | | SLC10A7 | | |
| | | SPON2 | | |
| | | TDRD1 | | |
| | | TMC5 | | |
| | | TRIB1 | | |

TABLE 7B
Up- and down-regulated biomarkers compared to
Rv3 in at least 1 subject from group I or II

| vs. Reference Std Version 3 (Rv3) | | | vs. Reference Std Version 3 (Rv3) | | |
|---|---|---|---|---|---|
| Group I T3 + 2 (n = 1) | | | Group II T3 + 3 (n = 8) | | |
| | | UP/ | | | UP/ |
| | | DOWN | | | DOWN |
| UP | DOWN | x > x̅ + 2σx or | UP | DOWN | x > x̅ + 2σx or |
| x > x̅ + 2σx | x < x̅ − 2σx | x < x̅ − 2σx | x > x̅ + 2σx | x < x̅ − 2σx | x < x̅ − 2σx |

| | | | | |
|---|---|---|---|---|
| KCNMA1 | LRRN1* | ZFC3H1 | CDIPT | ADM* |
| PCA3 | ACSM3 | ACPP | APOE | C15orf48 |
| TDRD1 | C10orf116 | ACSM3 | CLU | F5 |
| | F5 | AGR2 | CSRP1.583 | FLNA |
| | SLC22A17 | AKR1C3 | CSRP1.690 | GPR116 |
| | AR(460) | AZGP1 | ETV1 | HSBP1 |
| | TFAP2 | C10orf116 | ETV4* | KCNMA1 |
| | | CRISP3 | FAM3D | MCC |
| | | CRISPLD1 | FHL2 | MYEF2 |
| | | CST4 | HN1* | SAA2 |
| | | DDC* | LRRN1* | SELM |
| | | GLO1 | MYLK | SLC22A17 |
| | | GRAMD4 | LOC100506990 | SYNPO2 |
| | | HIF1A | PEX10 | APOC1 |
| | | HIPK2 | PFKL | AR.460 |
| | | HPGD | SRC | TFAP2 |
| | | IGFBP1* | TPM2 | |
| | | KLK3 | MUC1* | |
| | | PCA3 | OPRK1* | |
| | | PLA2G7 | | |
| | | PSMA | | |
| | | SERPINA1 | | |
| | | SFRP1 | | |
| | | SLC10A7 | | |
| | | SPON2 | | |
| | | TDRD1 | | |
| | | TMC5 | | |
| | | TRIB1 | | |
| | | HOXC4 | | |
| | | MSMB | | |

### Example 5

### Analysis of Group III (Gleason Scores of 3+4) Prostate Cancer Tissue Samples Using RBAS and Comparison to Rv2 and Rv3

[0162] Expression levels obtained through the RBAS protocol described in Example 1 from four tumor samples from subjects with a Gleason score of 3+4 were compared to Rv2 and Rv3, established as per Example 3. Biomarkers were selected based on their expression level in the tumor sample as per Example 4. A list of the selected biomarkers is given in Tables 8A and 8B below.

[0163] When comparing to Rv2, twenty-two biomarkers were found to be up-regulated and sixteen biomarkers were down-regulated. Six biomarkers presented with significant changes compared to Rv2 but showed both up- and down-regulation in two or more samples. When comparing to Rv3, twenty-five biomarkers were found to be up-regulated in at least one sample of group II, of which twenty-one matched those selected when comparing to Rv2. Seventeen biomarkers were found to be down-regulated, of which fifteen matched those selected when comparing to Rv2. Eight biomarkers were found to be both up- and down-regulated in two or more samples, of which seven matched those selected when comparing to Rv2.

TABLE 8A
Up- and Down-regulated biomarkers in at least 1 subject
with a tumor with a Gleason score of 3 + 4 compared to Rv2
vs. Reference Std Version 2 (Rv2)
Group III T3 + 4 (n = 4)

| | | UP/ |
|---|---|---|
| | | DOWN |
| UP | DOWN | x > x̅ + 2σx or |
| x > x̅ + 2σx | x < x̅ − 2σx | x < x̅ − 2σx |
| ACSM3 | C19orf50 | AR.460 |
| AGR2 | ADM* | F5 |
| AKR1C3 | CLU | GLO1 |
| AZGP1 | CSRP1.690 | HN1* |
| C15orf48 | CST4 | HSBP1 |
| CRISP3 | ETV4* | PEX10 |
| CRISPLD1 | HPGD | |
| DDC* | KCNMA1 | |
| FGG* | LOC100506990 | |
| GPR116 | PDZK1IP1 | |
| GRIN3A* | PFKL | |
| HIPK2 | SAA2 | |
| HPN | SELM | |
| IGFBP1* | SMAD5 | |
| PCA3 | SYNPO2 | |
| PLA2G7 | TFAP2 | |
| PSMA | | |
| SLC10A7 | | |
| SLC22A17 | | |
| SPON2 | | |
| TDRD1 | | |
| TRIB1 | | |

TABLE 8B
Up- and Down-regulated biomarkers in at least 1 subject
with a tumor with a Gleason score of 3 + 4 compared to Rv3
vs. Reference Std Version 3 (Rv3)
Group III T3 + 4 (n = 4)

| | | UP/ |
|---|---|---|
| | | DOWN |
| UP | DOWN | x > x̅ + 2σx or |
| x > x̅ + 2σx | x < x̅ − 2σx | x < x̅ − 2σx |
| ACSM3 | C19orf50 | AR.460 |
| AGR2 | ADM* | F5 |
| AKR1C3 | CLU | GLO1 |
| AZGP1 | CSRP1.690 | HN1* |
| C15orf48 | CST4 | HSBP1 |
| CRISP3 | ETV4* | PEX10 |
| CRISPLD1 | HPGD | SLC22A17 |
| DDC* | KCNMA1 | TFAP2 |
| FGG* | LOC100506990 | |
| GPR116 | PDZK1IP1 | |
| GRIN3A* | PFKL | |
| HIPK2 | SAA2 | |
| HPN | SELM | |
| IGFBP1* | SMAD5 | |
| PCA3 | SYNPO2 | |
| PLA2G7 | MUC1* | |
| PSMA | OPRK1* | |
| SLC10A7 | | |
| SPON2 | | |
| TDRD1 | | |
| TRIB1 | | |
| APOC1 | | |
| KLK3 | | |
| MYEF2 | | |
| PIP* | | |

### Example 6

### Analysis of Group IV (Gleason Score of 4+3) Prostate Cancer Tissue Samples Using RBAS and Comparison to Rv2 and Rv3

[0164] Expression levels obtained using the RBAS protocol in Example 1 from four tumor samples from subjects with a Gleason score of 4+3 were compared to Rv2 and Rv3, established as per Example 3. Biomarkers were selected based on their expression level in the tumor sample as per Example 4. A list of the selected biomarkers is given in Tables 9A and 9B below.

[0165] When comparing to Rv2, twenty-eight biomarkers were found to be up-regulated and twenty six biomarkers were down-regulated. Seven biomarkers presented with significant changes compared to Rv2 but showed both up- and down-regulation in two or more samples. When comparing to Rv3, twenty-nine biomarkers were found to be up-regulated in at least one sample of group II, of which twenty eight matched those selected when comparing to Rv2. Twenty-seven biomarkers were found to be down-regulated, of which twenty-six matched those selected when comparing to Rv2. Eight biomarkers were found to be both up- and down-regulated in two or more samples, of which seven matched those selected when comparing to Rv2.

TABLE 9A
Up- and Down-regulated biomarkers in at least 1 subject
with a tumor with a Gleason score of 4 + 3 compared to Rv2
vs. Reference Std Version 2 (Rv2)
Group IV T4 + 3 (n = 4)

| | | UP/ |
|---|---|---|
| | | DOWN |
| UP | DOWN | x > x̅ + 2σx or |
| x > x̅ + 2σx | x < x̅ − 2σx | x < x̅ − 2σx |
| ACSM3 | FKBP15 | C19orf50 |
| AGR2 | CDIPT | AR.460 |
| AKR1C3 | ADM* | AZGP1 |
| APOC1 | CLU | C10orf116 |
| C15orf48 | CNN1 | ETV4* |
| CRISP3 | CSRP1.583 | F5 |
| CRISPLD1 | CSRP1.690 | HN1* |
| CST4 | ETV1 | |
| DDC* | FLNA | |
| GLO1 | GRAMD4 | |
| GPR116 | HSBP1 | |
| GRIN3A* | KCNMA1 | |
| HIPK2 | LRRN1* | |
| HPGD | MAP3K7 | |
| HPN | MCC | |
| MYEF2 | MSMB | |
| PCA3 | MYLK | |
| PEX10 | LOC100506990 | |
| PLA2G7 | PDZK1IP1 | |
| PSMA | PFKP | |
| SLC10A7 | RARRES | |
| SPON2 | SELM | |
| SPP1 | SERPINA1 | |
| TDRD1 | SLC22A17 | |
| TFAP2 | SYNPO2 | |
| TMC5 | TPM2 | |
| TRIB1 | | |
| TSPAN13 | | |

TABLE 9B
Up- and Down-regulated biomarkers in at least 1 subject
with a tumor with a Gleason score of 4 + 3 compared to Rv3
vs. Reference Std Version 3 (Rv3)
Group IV T4 + 3 (n = 4)

| | | UP/ |
|---|---|---|
| | | DOWN |
| UP | DOWN | x > x̅ + 2σx or |
| x > x̅ + 2σx | x < x̅ − 2σx | x < x̅ − 2σx |
| ACSM3 | FKBP15 | C19orf50 |
| AGR2 | CDIPT | AR.460 |
| AKR1C3 | ADM* | AZGP1 |
| APOC1 | CLU | C10orf116 |
| C15orf48 | CNN1 | ETV4* |
| CRISP3 | CSRP1.583 | F5 |
| CRISPLD1 | CSRP1.690 | HN1* |
| CST4 | ETV1 | MUC1* |
| DDC* | FLNA | |
| GLO1 | GRAMD4 | |
| GPR116 | HSBP1 | |
| GRIN3A* | KCNMA1 | |
| HIPK2 | LRRN1* | |
| HPGD | MAP3K7 | |
| HPN | MCC | |
| MYEF2 | MSMB | |
| PCA3 | MYLK | |
| PEX10 | LOC100506990 | |
| PLA2G7 | PDZK1IP1 | |
| PSMA | PFKP | |
| SLC10A7 | RARRES | |
| SPON2 | SELM | |
| SPP1 | SERPINA1 | |
| TDRD1 | SLC22A17 | |
| TFAP2 | SYNPO2 | |
| TMC5 | TPM2 | |
| TRIB1 | OPRK1* | |
| TSPAN13 | | |
| HOXC4 | | |

### Example 7

### Analysis of Group V (Gleason Scores of 4+4, 4+5, 5+5) Prostate Cancer Tissue Samples Using RBAS and Comparison to Rv2 and Rv3

[0166] Expression levels obtained through the RBAS protocol in Example 1 from one tumor sample from a subject with a Gleason score of 4+4, one tumor sample from a subject with a Gleason score of 4+5 and one tumor sample from a subject with a Gleason score of 5+5 were compared to Rv2 and Rv3, established as per Example 3. Biomarkers were selected based on their expression level in the tumor sample as per Example 4. A list of the selected biomarkers is given in Tables 10A & 10B.

[0167] When comparing to Rv2, nineteen biomarkers were found to be up-regulated and twenty four biomarkers were down-regulated. Seven biomarkers presented with significant changes compared to Rv2 but showed both up- and down-regulation in two or more samples. When comparing to Rv3, twenty-two biomarkers were found to be up-regulated in at least one sample of group II, of which eighteen matched those selected when comparing to Rv2. Twenty-seven biomarkers were found to be down-regulated, of which twenty four matched those selected when comparing to Rv2. Eight biomarkers were found to be both up- and down-regulated in two or more samples, of which seven matched those selected when comparing to Rv2.

TABLE 10A
Up- and Down-regulated biomarkers in at least 1 subject with
a tumor with a Gleason score of 8, 9 or 10 compared to Rv2
vs. Reference Std Version 2 (Rv2)
Group V T4 + 4-->5 + 5 (n = 3)

| | | UP/ |
|---|---|---|
| | | DOWN |
| UP | DOWN | x > x̅ + 2σx or |
| x > x̅ + 2σx | x < x̅ − 2σx | x < x̅ − 2σx |
| ACSM3 | C10orf116 | ADM* |
| APOC1 | CLU | CST4 |
| APOE | CNN1 | ETV4* |
| AR.460 | CSRP1.583 | F5 |
| AZGP1 | CSRP1.690 | GLO1 |
| C1orf64 | FLNA | PEX10 |
| CRISP3 | GRAMD4 | PLA2G7 |
| CRISPLD1 | HSBP1 | |
| ETV1 | LRRN1* | |
| HN1* | MCC | |
| HPN | MYLK | |
| IGFBP1* | LOC100506990 | |
| MYEF2 | PDZK1IP1 | |
| PSMA | PFKL | |
| SLC10A7 | PSCA | |
| SPON2 | RARRES | |
| TDRD1 | SAA2 | |
| TMC5 | SELM | |
| TRIB1 | SERPINA1 | |
| | SLC22A17 | |
| | SMAD5 | |
| | SYNM | |
| | SYNPO2 | |
| | TPM2 | |

TABLE 10B
Up- and Down-regulated biomarkers in at least 1 subject with
a tumor with a Gleason score of 8, 9 or 10 compared to Rv3
vs. Reference Std Version 3 (Rv3)
Group V T4 + 4-->5 + 5 (n = 3)

| | | UP/ |
|---|---|---|
| | | DOWN |
| UP | DOWN | x > x̅ + 2σx or |
| x > x̅ + 2σx | x < x̅ − 2σx | x < x̅ − 2σx |
| ACSM3 | C10orf116 | ADM* |
| APOC1 | CLU | CST4 |
| APOE | CNN1 | ETV4* |
| AR.460 | CSRP1.583 | F5 |
| AZGP1 | CSRP1.690 | GLO1 |
| CRISP3 | FLNA | PEX10 |
| CRISPLD1 | GRAMD4 | PLA2G7 |
| ETV1 | HSBP1 | TFAP2 |
| HN1* | LRRN1* | |
| HPN | MCC | |
| IGFBP1* | MYLK | |
| MYEF2 | LOC100506990 | |
| PSMA | PDZK1IP1 | |
| SLC10A7 | PFKL | |
| SPON2 | PSCA | |
| TDRD1 | RARRES | |
| TMC5 | SAA2 | |
| TRIB1 | SELM | |
| DDC* | SERPINA1 | |
| HIPK2 | SLC22A17 | |
| PCA3 | SMAD5 | |
| UGT2B15* | SYNM | |
| | SYNPO2 | |
| | TPM2 | |
| | FHL2 | |
| | MUC1* | |
| | OPRK1* | |

### Example 8

### Comparison of Results Obtained by Comparing Prostate Cancer Tissue Samples to their Own Adjacent Glandular Sample, Rv1, Rv2 and Rv3

[0168] By comparing the results per subject across all methods used to select markers that are differentially expressed, we aimed to select markers that were differentially expressed no matter which reference was used to detect differential expression. The differential expression detected in these markers is considered to be the most reliable.

[0169] Tables 11A, B and C show examples of the comparison of the results of one sample from Group II, II and IV respectively across the four methods used.

TABLE 11A
Example of the comparison of the results for
one subject of Group II across all methods

| | T v A | T v Rv1 | T v Rv2 | T v Rv3 |
|---|---|---|---|---|
| Biomarker | S35T33 | S35T33 | S35T33 | S35T33 |
| F5 | + | + | + | + |
| GPR116 | + | + | + | + |
| PCA3 | + | + | + | + |
| PSMA | + | + | + | + |
| SLC10A7 | + | + | + | + |
| PLA2G7 | + | + | + | + |
| TDRD1 | + | + | + | + |
| ZFC3H1 | | + | + | + |
| CST4 | + | | + | + |
| MYEF2 | + | + | | + |
| TMC5 | | + | + | + |
| CRISP3 | + | | + | + |
| APOC1 | | + | | + |
| HIPK2 | | + | | + |
| HPN | + | + | | |
| TFAP2 | | + | | + |
| EBF3* | + | + | | |
| AGR2 | | + | | |
| FAM3D | + | | | |
| TSPAN13 | | + | | |
| C1orf64 | + | | | |
| HOXC4 | + | | | |
| LAMA1* | + | | | |
| PIP* | + | | | |
| TPX2* | + | | | |
| CDIPT | | − | − | − |
| CLU | | − | − | − |
| CSRP1 (690) | | − | − | − |
| ETV4* | | − | − | − |
| HSBP1 | | − | − | − |
| SELM | | − | − | − |
| AR (460) | | − | | − |
| FLNA | | | − | − |
| MCC | | | − | − |
| MYLK | | | − | − |
| LOC100506990 | | | − | − |
| SLC22A17 | | − | | − |
| TPM2 | | | − | − |
| C10orf116 | | − | | |
| FHL2 | | − | | |
| RARRES | − | | | |
| SMAD5 | | − | | |
| OPRK1* | + | | | − |
| LRRN1* | + | − | | |
| DDC* | ND | ND | ND | ND |
| FGG* | ND | ND | ND | ND |
| GRIN3A* | ND | ND | ND | ND |
| IGFBP1* | ND | ND | ND | ND |
| FKBP15 | | | | |
| C19ORF50 | | | | |
| ACPP | | | | |
| ACSM3 | | | | |
| ADM | | | | |

TABLE 11B
Example of the comparison of the results for
one subject of Group III across all methods

| | T v A | T v Rv1 | T v Rv2 | T v Rv3 |
|---|---|---|---|---|
| Biomarker | S41T34 | S41T34 | S41T34 | S41T34 |
| CRISPLD1 | + | + | + | + |
| SLC10A7 | + | + | + | + |
| TDRD1 | + | + | + | + |
| FGG* | + | + | + | + |
| APOC1 | + | + | | + |
| DDC* | | + | + | + |
| GPR116 | + | | + | + |
| PCA3 | + | + | | + |
| GRIN3A* | + | | + | + |
| AKR1C3 | | | + | + |
| C15orf48 | + | + | | |
| SLC22A17 | | | + | + |
| HPN | + | + | | |
| PIP* | | + | | |
| SPON2 | + | | | |
| SPP1 | + | | | |
| ACSM3 | + | | | |
| APOE | + | | | |
| C1orf64 | + | | | |
| CRISP3 | + | | | |
| ETV4* | + | | | |
| LRRN1* | + | | | |
| PLA2G7 | + | | | |
| PSCA | + | | | |
| PEX10 | − | − | − | − |
| HPGD | − | − | − | − |
| PDZK1IP1 | − | − | − | − |
| SAA2 | − | − | − | − |
| AR (460) | | − | − | − |
| CLU | | − | − | − |
| PFKL | | − | − | − |
| SMAD5 | | − | − | − |
| TFAP2 | | − | − | − |
| CSRP1 (690) | | − | | − |
| GLO1 | | | − | − |
| KCNMA1 | | | − | − |
| ZFC3H1 | | − | | |
| AZGP1 | − | | | |
| HIPK2 | | − | | |
| MAP3K7 | | − | | |
| MSMB | − | | | |
| SRC | | − | | |
| C19ORF50 | ND | − | − | − |
| CST4 | ND | − | − | − |
| ADM* | ND | − | − | − |
| F5 | ND | − | − | − |
| HN1* | ND | − | − | − |
| LOC100506990 | ND | − | − | − |
| ETV1 | + | − | | |
| MUC1* | ND | − | ND | − |
| EBF3* | − | − | ND | ND |
| HOXC4 | ND | ND | ND | ND |
| IGFBP1* | ND | ND | ND | ND |
| LAMA1* | ND | ND | ND | ND |
| OPRK1* | ND | ND | ND | ND |
| TPX2* | ND | ND | ND | ND |
| UGT2B15* | ND | ND | ND | ND |
| FKBP15 | | | | |
| CDIPT | | | | |
| ACPP | | | | |
| AGR2 | | | | |
| C10orf116 | | | | |

TABLE 11C
Example of the comparison of the results for
one subject of Group IV across all methods

| | T v A | T v Rv1 | T v Rv2 | T v Rv3 |
|---|---|---|---|---|
| Biomarker | S26T43 | S26T43 | S26T43 | S26T43 |
| C15orf48 | + | + | + | + |
| CRISP3 | + | + | + | + |
| CST4 | + | + | + | + |
| F5 | + | + | + | + |
| GPR116 | + | + | + | + |
| HPN | + | + | + | + |
| PCA3 | + | + | + | + |
| PEX10 | + | + | + | + |
| PLA2G7 | + | + | + | + |
| TDRD1 | + | + | + | + |
| AZGP1 | | + | + | + |
| GLO1 | | + | + | + |
| PSMA | | + | + | + |
| SLC10A7 | | + | + | + |
| DDC* | | | + | + |
| HIPK2 | | + | | + |
| MYEF2 | | + | | + |
| SPON2 | | | + | + |
| HOXC4 | + | | | + |
| ZFC3H1 | | + | | |
| AGR2 | | + | | |
| C1orf64 | + | | | |
| LAMA1* | + | | | |
| SETMAR | | + | | |
| TMC5 | | + | | |
| CDIPT | | − | − | − |
| CLU | | − | − | − |
| CSRP1 (690) | | − | − | − |
| ETV4* | | − | − | − |
| GRAMD4 | | − | − | − |
| HSBP1 | | − | − | − |
| SELM | | − | − | − |
| FLNA | | | − | − |
| RARRES | | | − | − |
| SLC22A17 | | − | | − |
| SYNPO2 | | | − | − |
| ETV1 | | − | | |
| FHL2 | | − | | |
| LRRN1* | | − | | |
| OPRK1* | | | | − |
| UGT2B15* | − | ND | ND | ND |
| FGG* | ND | ND | ND | ND |
| IGFBP1* | ND | ND | ND | ND |
| FKBP15 | | | | |
| C19ORF50 | | | | |
| ACPP | | | | |
| ACSM3 | | | | |

### Example 9

### Signature Predictions and Observations

[0170] (a) a Signature for Prostate Cancer Using Results from the Comparison Between Tumor Samples and their Own Adjacent Glandular Sample

[0171] Based on the results from Example 2, a combination of biomarkers was sought that was able to identify prostate cancer in groups II, III and IV. Groups I and V were not included due to low sample numbers. A combination of five biomarkers was identified, which included redundant biomarkers so that from these five, combinations of three biomarkers can be made that still identify all tumor samples as prostate cancer. The combinations and results are given in Table 12.

TABLE 12
Signature for prostate cancer formed by the comparison between tumor and adjacent
glandular sample

| Biomarker | S32T33 | S2T33 | S9T33 | S19T33 | S20T33 | S21T33 | S24T33 | S35T33 |
|---|---|---|---|---|---|---|---|---|
| PCA3 | + | | + | + | + | + | | + |
| C1orf64 | + | | + | + | | + | + | + |
| TDRD1 | + | + | | | + | + | | + |
| CST4 | | | | | + | + | | + |
| PSMA | + | | + | + | + | + | | + |

Combination 1

| | | | | | | | | |
|---|---|---|---|---|---|---|---|---|
| PCA3 | + | | + | + | + | + | | + |
| TDRD1 | + | + | | | + | + | | + |
| C1orf64 | + | | + | + | | + | + | + |

Combination 2

| | | | | | | | | |
|---|---|---|---|---|---|---|---|---|
| C1orf64 | + | | + | + | | + | + | + |
| TDRD1 | + | + | | | + | + | | + |
| CST4 | | | | | + | + | | + |

Combination 3

| C1orf64 | + | | + | + | | + | + | + |
|---|---|---|---|---|---|---|---|---|
| TDRD1 | + | + | | | + | + | | + |
| PSMA | + | | + | + | + | + | | + |
| Biomarker | S33T34 | S34T34 | S37T34 | S41T34 | S38T43 | S39T43 | S26T43 | S40T43 |
| PCA3 | + | + | | + | + | + | + | + |
| C1orf64 | + | | + | + | | + | + | |
| TDRD1 | + | + | + | + | | + | + | + |
| CST4 | | + | | | + | + | + | + |
| PSMA | + | | | | + | | | + |

Combination 1

| | | | | | | | | |
|---|---|---|---|---|---|---|---|---|
| PCA3 | + | + | | + | + | + | + | + |
| TDRD1 | + | + | + | + | | + | + | + |
| C1orf64 | + | | + | + | | + | + | |

Combination 2

| | | | | | | | | |
|---|---|---|---|---|---|---|---|---|
| C1orf64 | + | | + | + | | + | + | |
| TDRD1 | + | + | + | + | | + | + | + |
| CST4 | | + | | | + | + | + | + |

Combination 3

| | | | | | | | | |
|---|---|---|---|---|---|---|---|---|
| C1orf64 | + | | + | + | | + | + | |
| TDRD1 | + | + | + | + | | + | + | + |
| PSMA | + | | | | + | | | + |

(b) a Signature for Prostate Cancer Using Biomarkers that are Up-Regulated in Every Method as Per Example 8

[0172] Based on the results of Example 8, a combination of biomarkers was sought that identified prostate cancer in all samples from groups II, III and IV no matter which reference was used to detect differential expression. A combination of nine biomarkers was identified in this way, using only those biomarkers that were consistently up-regulated with respect to the control. The combination and results are given in Tables 13A-C.

Tables 13a-C: Signature for Prostate Cancer Using Biomarkers that are Up-Regulated in Tumor Compared to all References (Adjacent (A), Rv1, Rv2 & Rv3)

TABLE 13A

| | ACSM | | | | | | | | | | | | | | | |
|---|---|---|---|---|---|---|---|---|---|---|---|---|---|---|---|---|
| | | T v | | | ADM* | | | | AZGP1 | | | | C15orf48 | | | |
| Subject | T v A | Rv1 | T v Rv2 | T v Rv3 | T v A | T v Rv1 | T v Rv2 | T v Rv3 | T v A | T v Rv1 | T v Rv2 | T v Rv3 | T v A | T v Rv1 | T v Rv2 | T v Rv3 |
| S02T33 | | | | | + | + | + | + | | | | | | + | + | + |
| S19T33 | | | | | | | | | | + | + | + | | | | |
| S20T33 | | + | + | + | | | | | + | | | | + | + | | + |
| S21T33 | | + | + | + | | | | | + | + | + | + | + | + | | + |
| S24T33 | + | + | + | + | | | | | | | | | | | | |
| S35T33 | | | | | | | | | | | | | | | | |
| S32T33 | | + | | | + | | | | + | + | + | + | + | | | |
| S9T33 | | | | | | | | | | | | | | | | |
| S33T34 | | | | | | | | | | | | | | | | |
| S34T34 | | + | + | + | | | | | | + | + | + | | + | | |
| S37T34 | | | | | | | | | | + | + | + | + | + | + | + |
| S41T34 | + | | | | | | | | | | | | + | + | | |
| S38T43 | + | | | | | | | | | | | | | | | |
| S39T43 | + | + | + | + | + | | | | | | | | | | | |
| S26T43 | | | | | | | | | | + | + | + | + | + | + | + |
| S40T43 | | + | + | + | | | | | | | | | | + | + | + |

TABLE 13B

| | CST4 | | | | | | | | | | | | | | | |
|---|---|---|---|---|---|---|---|---|---|---|---|---|---|---|---|---|
| | | T v | | | KLK3 | | | | PLA2G7 | | | | SLC10A7 | | | |
| Subject | T v A | Rv1 | T v Rv2 | T v Rv3 | T v A | T v Rv1 | T v Rv2 | T v Rv3 | T v A | T v Rv1 | T v Rv2 | T v Rv3 | T v A | T v Rv1 | T v Rv2 | T v Rv3 |
| S02T33 | | | | | | | | | | | | | | + | + | + |
| S19T33 | | | | | | + | + | + | + | + | + | + | | + | | + |
| S20T33 | + | | | | + | + | | | + | | + | + | | + | | |
| S21T33 | + | | | | | + | | + | | | | | | | | |
| S24T33 | | | | | | | | | | | | | | + | | + |
| S35T33 | + | | + | + | | | | | + | + | + | + | + | + | + | + |
| S32T33 | | | | | | + | | | | | | | | + | + | + |
| S9T33 | | | | | | + | + | + | | | | | | | | |
| S33T34 | | | | | | | | | + | + | + | + | | + | + | + |
| S34T34 | + | | | | | + | | | + | + | + | + | | + | + | + |
| S37T34 | | | | | | + | | + | | | | | | + | | + |
| S41T34 | | | | | | | | | + | | | | + | + | + | + |
| S38T43 | + | + | + | + | | | | | + | + | + | + | | + | + | + |
| S39T43 | + | + | + | + | | | | | + | | + | + | + | + | + | + |
| S26T43 | + | + | + | + | | | | | + | + | + | + | | + | + | + |
| S40T43 | + | + | + | + | | | | | + | + | + | + | | + | + | + |

TABLE 13C

TMC5

| | | T v | T v | T v |
|---|---|---|---|---|
| Subject | T v A | Rv1 | Rv2 | Rv3 |
| S02T33 | | | | |
| S19T33 | + | | | |
| S20T33 | + | + | + | + |
| S21T33 | + | | | |
| S24T33 | | | | |
| S35T33 | | + | + | + |
| S32T33 | | | | |
| S9T33 | | | | |
| S33T34 | + | | | |
| S34T34 | | + | | |
| S37T34 | | | | |
| S41T34 | | | | |
| S38T43 | + | + | + | + |
| S39T43 | | | | |
| S26T43 | | + | | |
| S40T43 | | | | |

(c) a Signature for Prostate Cancer Using Biomarkers that are Up- or Down-Regulated in Every Method as Per Example 8

[0173] Based on the results of Example 8, we then sought to identify a combination of biomarkers that identified prostate cancer in all samples from groups II, III and IV no matter which reference was used to detect differential expression. A combination of seven biomarkers was identified in this way, using biomarkers that were consistently up- or down-regulated with respect to the control. The combination and results are given in Tables 14A and B.

Tables 14a and B: Signature for Prostate Cancer Using Biomarkers that are Up- or Down-Regulated in Tumor Compared to all References (Adjacent (A), Rv1, Rv2 & Rv3)

TABLE 14A

| | AZGP1 | | | | | | | | | | | | | | | |
|---|---|---|---|---|---|---|---|---|---|---|---|---|---|---|---|---|
| | | T v | | | ADM* | | | | C15orf48 | | | | ETV4* | | | |
| Subject | T v A | Rv1 | T v Rv2 | T v Rv3 | T v A | T v Rv1 | T v Rv2 | T v Rv3 | T v A | T v Rv1 | T v Rv2 | T v Rv3 | T v A | T v Rv1 | T v Rv2 | T v Rv3 |
| S02T33 | | | | | + | + | + | + | | + | + | + | | − | − | − |
| S19T33 | | + | + | + | − | − | − | − | − | − | − | − | − | − | − | − |
| S20T33 | + | | | | | | | | + | + | | + | | − | | |
| S21T33 | + | + | + | + | | | | | + | + | | + | − | − | | |
| S24T33 | | | | | − | − | − | − | | | | | | | | |
| S35T33 | | | | | | | | | | | | | | − | − | − |
| S32T33 | + | + | + | + | + | | | | + | | | | − | − | − | − |
| S9T33 | | | | | | | | | | | | | | − | | − |
| S33T34 | | | | | | | | | | | | | − | − | − | − |
| S34T34 | | + | + | + | | | | | | + | | | | − | − | − |
| S37T34 | | + | + | + | | | | | + | + | + | + | | | | |
| S41T34 | | | | | | − | − | − | + | + | | | + | | | |
| S38T43 | | | | | | − | − | − | | | | | | + | + | + |
| S39T43 | | | | | + | | | | | | | | | − | − | − |
| S26T43 | | + | + | + | | | | | + | + | + | + | | − | − | − |
| S40T43 | | | | | | | | | | + | + | + | | − | − | − |

TABLE 14B

| | GPR116 | | | | TDRD1 | | | | TMC5 | | | |
|---|---|---|---|---|---|---|---|---|---|---|---|---|
| Subject | T v A | T v Rv1 | T v Rv2 | T v Rv3 | T v A | T v Rv1 | T v Rv2 | T v Rv3 | T v A | T v Rv1 | T v Rv2 | T v Rv3 |
| S02T33 | | | + | + | + | | | + | | | | |
| S19T33 | | | | | | | | | + | | | |
| S20T33 | | | | | + | + | | + | + | + | + | + |
| S21T33 | | | | | + | | | + | + | | | |
| S24T33 | | | | | − | | | | − | | | |
| S35T33 | + | + | + | + | + | + | + | + | | + | + | + |
| S32T33 | | | | | + | + | | + | | | | |
| S9T33 | − | − | − | − | − | | | | | | | |
| S33T34 | + | + | + | + | + | + | + | + | + | | | |
| S34T34 | | | | | + | + | + | + | | + | | |
| S37T34 | | | | | + | | | + | | | | |
| S41T34 | + | | + | + | + | + | + | + | | | | |
| S38T43 | | + | + | + | | | | | + | + | + | + |
| S39T43 | + | | | | + | + | + | + | | | | |
| S26T43 | + | + | + | + | + | + | + | + | | + | | |
| S40T43 | + | + | + | + | + | + | | + | | | | |

### Example 10

[0174] We reviewed each Gleason group independently and identified a signature that was common across the subjects of that group. For example, Group IV had eleven biomarkers that were consistently differentially expressed. This eleven biomarker signature was then compared to all other subjects to determine whether it was specific to Group IV.

[0175] We made the observation that subject 35 looked significantly different in these eleven biomarkers from other members of its Group (i.e. Group II) but aligned well with members of Group IV apart from one biomarker (PEX10). The combination of these observations is given in Tables 15A, parts I-III, and 15B, parts I-III.

[0176] This observation indicates that it may be possible to use molecular biomarker profiling to identify subgroups or re-categorize groups originally organized by Gleason score.

TABLE 15A
Signature common across the subjects of Group IV
I

| | | CRISP3 | | | | CSRP1 (690) | | | | | | | | | | | |
|---|---|---|---|---|---|---|---|---|---|---|---|---|---|---|---|---|---|
| | | | T v | T v | T v | | T v | T v | | CST4 | | | | F5 | | | |
| | Subject | T v A | Rv1 | Rv2 | Rv3 | T v A | Rv1 | Rv2 | T v Rv3 | T v A | T v Rv1 | T v Rv2 | T v Rv3 | T v A | T v Rv1 | T v Rv2 | T v Rv3 |
| Group 2 | S02T33 | − | | | | | | | | | | | | | | | |
| | S19T33 | + | | + | + | | − | − | − | | | | | | | | |
| | S20T33 | | | | | | − | − | − | + | | | | | | | |
| | S21T33 | + | | | | | − | − | − | + | | | | | − | | |
| | S24T33 | − | | | | | | | | | | | | | | | |
| | S35T33 | + | | + | + | | − | − | − | + | | + | + | + | + | + | + |
| | S32T33 | + | | | | | − | | − | | | | | | − | − | − |
| | S9T33 | | | | | | − | | − | | | | | | − | − | − |
| Group 3 | S33T34 | + | + | + | + | | − | | | | | | | + | + | + | + |
| | S34T34 | | | | | | − | − | − | + | − | − | − | | + | + | + |
| | S37T34 | | | | | | | | | | | | | | − | − | − |
| | S41T34 | + | | | | | − | | − | | − | − | − | | − | − | − |
| Group 4 | S38T43 | + | | + | + | − | − | − | − | + | + | + | + | + | + | + | + |
| | S39T43 | + | | | | | − | − | − | + | + | + | + | − | − | − | − |
| | S26T43 | + | + | + | + | | − | − | − | + | + | + | + | + | + | + | + |
| | S40T43 | + | + | + | + | | − | | − | + | + | + | + | + | + | + | + |

II

| | | GPR116 | | | | HPN | | | | | | | | | | | |
|---|---|---|---|---|---|---|---|---|---|---|---|---|---|---|---|---|---|
| | | | T v | T v | T v | | T v | T v | | PCA3 | | | | PEX10 | | | |
| | Subject | T v A | Rv1 | Rv2 | Rv3 | T v A | Rv1 | Rv2 | T v Rv3 | T v A | T v Rv1 | T v Rv2 | T v Rv3 | T v A | T v Rv1 | T v Rv2 | T v Rv3 |
| Group 2 | S02T33 | | | + | + | | | | | | + | | + | | | | |
| | S19T33 | | | | | + | + | | | + | + | | + | | | | |
| | S20T33 | | | | | + | + | | | + | + | | + | | | | |
| | S21T33 | | | | | + | + | | | + | + | | + | | − | | |
| | S24T33 | | | | | − | | | | − | | | | | | | |
| | S35T33 | + | + | + | + | + | + | | | + | + | + | + | | | | |
| | S32T33 | | | | | + | + | | | + | + | | + | | | | |
| | S9T33 | − | − | − | − | | | | | + | + | | + | | − | − | − |
| Group 3 | S33T34 | + | + | + | + | + | + | + | + | + | + | + | + | | + | + | + |
| | S34T34 | | | | | + | + | + | + | + | + | | + | + | + | + | + |
| | S37T34 | | | | | + | | | | | + | | + | | | | |
| | S41T34 | + | | + | + | + | + | | | + | + | | + | − | − | − | − |
| Group 4 | S38T43 | | + | + | + | + | | | | + | + | | + | + | + | + | + |
| | S39T43 | + | | | | + | | | | + | + | | + | | − | | |
| | S26T43 | + | + | + | + | + | + | + | + | + | + | + | + | + | + | + | + |
| | S40T43 | + | + | + | + | + | + | + | + | + | + | + | + | + | + | + | + |

III

| | | PLA2G7 | | | | SLC10A7 | | | | SLC22A17 | | | |
|---|---|---|---|---|---|---|---|---|---|---|---|---|---|
| | Subject | T v A | T v Rv1 | T v Rv2 | T v Rv3 | T v A | T v Rv1 | T v Rv2 | T v Rv3 | T v A | T v Rv1 | T v Rv2 | T v Rv3 |
| Group 2 | S02T33 | | | | | | + | + | + | | | + | + |
| | S19T33 | + | + | + | + | | + | | + | | | | |
| | S20T33 | + | | + | + | | + | | | | − | | |
| | S21T33 | | | | | | | | | | − | − | − |
| | S24T33 | − | | | | | + | | + | | − | | |
| | S35T33 | + | + | + | + | + | + | + | + | | − | | − |
| | S32T33 | | | | | | + | + | + | | − | | |
| | S9T33 | | | | | | | | | | | | |
| Group 3 | S33T34 | + | + | + | + | | + | + | + | | − | | |
| | S34T34 | + | + | + | + | | + | + | + | | − | | − |
| | S37T34 | | | | | | + | | + | | − | | |
| | S41T34 | + | | | | + | + | + | + | | | + | + |
| Group 4 | S38T43 | + | + | + | + | | + | + | + | | − | | − |
| | S39T43 | + | | + | + | + | + | + | + | − | − | − | − |
| | S26T43 | + | + | + | + | | + | + | + | | − | | − |
| | S40T43 | + | + | + | + | | + | + | + | | − | − | − |

TABLE 15B
Comparison of Subject 35, from Group II with subjects from Group IV
I

| | | CRISP3 | | | | CSRP1 (690) | | | | | | | | | | | |
|---|---|---|---|---|---|---|---|---|---|---|---|---|---|---|---|---|---|
| | | | T v | T v | T v | | T v | T v | | CST4 | | | | F5 | | | |
| | Subject | T v A | Rv1 | Rv2 | Rv3 | T v A | Rv1 | Rv2 | T v Rv3 | T v A | T v Rv1 | T v Rv2 | T v Rv3 | T v A | T v Rv1 | T v Rv2 | T v Rv3 |
| Group 4 | S38T43 | + | | + | + | − | − | − | − | + | + | + | + | + | + | + | + |
| | S39T43 | + | | | | | − | − | − | + | + | + | + | − | − | − | − |
| | S26T43 | + | + | + | + | | − | − | − | + | + | + | + | + | + | + | + |
| | S40T43 | + | + | + | + | | − | | − | + | + | + | + | + | + | + | + |
| | S35T33 | + | | + | + | | − | − | − | + | | + | + | + | + | + | + |

II

| | | GPR116 | | | | HPN | | | | | | | | | | | |
|---|---|---|---|---|---|---|---|---|---|---|---|---|---|---|---|---|---|
| | | | T v | T v | T v | | T v | T v | | PCA3 | | | | PEX10 | | | |
| | Subject | T v A | Rv1 | Rv2 | Rv3 | T v A | Rv1 | Rv2 | T v Rv3 | T v A | T v Rv1 | T v Rv2 | T v Rv3 | T v A | T v Rv1 | T v Rv2 | T v Rv3 |
| Group 4 | S38T43 | | + | + | + | + | | | | + | + | | + | + | + | + | + |
| | S39T43 | + | | | | + | | | | + | + | | + | | − | | |
| | S26T43 | + | + | + | + | + | + | + | + | + | + | + | + | + | + | + | + |
| | S40T43 | + | + | + | + | + | + | + | + | + | + | + | + | + | + | + | + |
| | S35T33 | + | + | + | + | + | + | | | + | + | + | + | | | | |

III

| | | PLA2G7 | | | | SLC10A7 | | | | SLC22A17 | | | |
|---|---|---|---|---|---|---|---|---|---|---|---|---|---|
| | Subject | T v A | T v Rv1 | T v Rv2 | T v Rv3 | T v A | T v Rv1 | T v Rv2 | T v Rv3 | T v A | T v Rv1 | T v Rv2 | T v Rv3 |
| Group 4 | S38T43 | + | + | + | + | | + | + | + | | − | | − |
| | S39T43 | + | | + | + | + | + | + | + | − | − | − | − |
| | S26T43 | + | + | + | + | | + | + | + | | − | | − |
| | S40T43 | + | + | + | + | | + | + | + | | − | − | − |
| | S35T33 | + | + | + | + | + | + | + | + | | − | | − |

[0177] While the present invention has been described with reference to the specific embodiments thereof, it should be understood by those skilled in the art that various changes may be made and equivalents may be substituted without departing from the true spirit and scope of the invention. In addition, many modifications may be made to adapt a particular situation, material, composition of matter, method, method step or steps, for use in practicing the present invention. All such modifications are intended to be within the scope of the claims appended hereto.

[0178] Unless otherwise defined, all technical and scientific terms used herein have the same meaning as commonly understood by one of ordinary skill in the art to which this invention pertains. All of the publications, patent applications and patents cited in this application are herein incorporated by reference in their entirety to the same extent as if each individual publication, patent application or patent was specifically and individually indicated to be incorporated by reference in its entirety.

[0179] SEQ ID NO: 1-419 are set out in the attached Sequence Listing. The codes for nucleotide sequences used in the attached Sequence Listing, including the symbol “n,” conform to WIPO Standard ST.25 (1998), Appendix 2, Table 1.

1. A method for detecting the presence of prostate cancer in a subject, comprising:
(a) determining the relative frequency of expression of a plurality of RNA biomarkers simultaneously in a biological sample obtained from the subject, wherein the plurality of RNA biomarkers is selected from the group consisting of: RNA sequences corresponding to DNA sequences provided in SEQ ID NO: 1-75, 235-292, 327-351, 418 and 419, and wherein the frequency of expression is determined using next generation sequencing of an amplicon cDNA library prepared using a plurality of oligonucleotide primers specific for the plurality of RNA biomarkers;
(b) comparing the relative frequency of expression of the plurality of RNA biomarkers in the biological sample with a predetermined threshold value; and
(c) determining the presence of prostate cancer if there is an increased or decreased relative frequency of expression of at least one RNA biomarker corresponding to a DNA sequence selected from the group consisting of SEQ ID NO: 1-71, 235-287, 327-340, 343-351, 418 and 419 compared to the predetermined threshold value.

2. The method of claim 1, wherein the amplicon cDNA library is prepared by:
(a) isolating total RNA from the biological sample;
(b) generating first strand cDNA from the total RNA using a plurality of first oligonucleotide primers specific for the plurality of RNA biomarkers;
(c) synthesizing second strand cDNA to provide double-stranded cDNA;
(d) adding at least one sequencing adapter to the double-stranded cDNA; and
(e) amplifying the double-stranded cDNA to provide the amplicon cDNA library.

3. The method of claim 2, wherein the first oligonucleotide primers are selected from the group consisting of: SEQ ID NO: 76-232, 293-326 and 352-417.

4. The method of claim 3, further comprising amplifying the double-stranded cDNA by polymerase chain reaction using a plurality of oligonucleotide primer pairs specific for the plurality of RNA biomarkers after step (c) and prior to step (d).

5. The method of claim 5, wherein at least one of the plurality of oligonucleotide primer pairs is selected from the group consisting of: SEQ ID NO: 76-232, 293-326 and 352-417.

6. The method of claim 1, wherein the amplicon cDNA library is prepared by:
(a) isolating total RNA from the biological sample;
(b) preparing first strand cDNA to provide single-stranded cDNA;
(c) amplifying the single-stranded cDNA by polymerase chain reaction using a plurality of oligonucleotide primer pairs specific for the plurality of RNA biomarkers to provide amplified double-stranded cDNA;
(d) adding at least one sequencing adapter to the amplified double-stranded cDNA; and
(e) further amplifying the amplified double-stranded cDNA using primers specific for the at least one sequencing adapter to provide the amplicon cDNA library.

7. The method of claim 7, wherein at least one member of the plurality of oligonucleotide primer pairs is selected from the group consisting of SEQ ID NO: 76-232, 293-326 and 352-417.

8. The method of claim 1, wherein the biological sample is selected from the group consisting of: urine, blood, serum, cell lines, peripheral blood mononuclear cells, biopsy tissue, and prostatectomy tissue.

9. The method of claim 1, wherein the frequency of expression of the plurality of RNA biomarkers is normalized to at least one reference gene selected from the group consisting of: SEQ ID NO: 72-75, 288-292, 341 and 342.

10. The method of claim 1, wherein the predetermined threshold value is established by measuring the expression level of the RNA biomarker in a plurality of biological samples selected from the group consisting of: (a) adjacent prostate gland samples obtained from the test subject; (b) prostate gland samples obtained from different, healthy, subjects; (c) a samples of prostatectomy gland tissue from prostatectomy samples that do not show primary tumors upon histological examination; (d) adjacent prostate gland samples obtained from different subjects with the same Gleason scores as the test subject; (e) adjacent prostate gland samples obtained from different subjects with different Gleason scores from the test subject; and (f) samples of normal human epithelial cells.

11. A method for monitoring progression of prostate cancer in a subject, comprising:
(a) determining the relative frequency of expression of a plurality of RNA biomarkers simultaneously in a biological sample obtained from the subject at a first time point, and determining the relative frequency of expression of the plurality of RNA biomarkers simultaneously in a biological sample obtained from the subject at a second, subsequent, time point, wherein the plurality of RNA biomarkers is selected from the group consisting of: RNA sequences corresponding to DNA sequences provided in SEQ ID NO: 1-75, 235-292, 327-351, 418 and 419, and wherein the relative frequency of expression is determined using next generation sequencing of an amplicon cDNA library prepared using a plurality of oligonucleotide primers specific for the plurality of RNA biomarkers;
(b) comparing the relative frequency of expression of the plurality of RNA biomarkers in the biological sample with a predetermined threshold value; and
(c) determining the progression of prostate cancer in the subject if the relative frequency of expression of the plurality of RNA biomarkers is increased or decreased at the second time point compared to the relative frequency of expression of the plurality of RNA biomarkers at the first time point.

12. The method of claim 11, wherein the amplicon cDNA library is prepared by:
(a) isolating total RNA from the biological sample;
(b) generating first strand cDNA from the total RNA using a plurality of first oligonucleotide primers specific for the plurality of RNA biomarkers;
(c) synthesizing second strand cDNA to provide double-stranded cDNA;
(d) adding at least one sequencing adapter to the double-stranded cDNA; and
(e) amplifying the double-stranded cDNA to provide the amplicon cDNA library.

13. The method of claim 12, wherein the first oligonucleotide primer is selected from the group consisting of SEQ ID NO: 76-232, 293-326 and 352-417.

14. The method of claim 10, further comprising amplifying the double-stranded cDNA by polymerase chain reaction using oligonucleotide primer pairs specific for the plurality of RNA biomarkers after step (c) and prior to step (d).

15. The method of claim 11, wherein the amplicon cDNA library is prepared by:
(a) isolating total RNA from the biological sample;
(b) preparing first strand cDNA to provide single-stranded cDNA;
(c) amplifying the single-stranded cDNA by polymerase chain reaction using a plurality of oligonucleotide primer pairs specific for the plurality of RNA biomarkers to provide amplified double-stranded cDNA;
(d) adding at least one sequencing adapter to the double-stranded cDNA; and
(e) amplifying the double-stranded cDNA using primers specific for the at least one sequencing adapter to provide the amplicon cDNA library.

16. The method of claim 15, wherein at least one member of the plurality of oligonucleotide primer pairs is selected from the group consisting of SEQ ID NO: SEQ ID NO: 76-232, 293-326 and 352-417.

17. The method of claim 11, wherein the biological sample is selected from the group consisting of: urine, blood, serum, cell lines, peripheral blood mononuclear cells, biopsy tissue, and prostatectomy tissue.

18. The method of claim 11, wherein the frequency of expression of the plurality of RNA biomarkers is normalized to at least one reference gene selected from the group consisting of: SEQ ID NO: 72-75, 288-292, 341 and 342.

19. A kit comprising a plurality of oligonucleotide primers selected from the group consisting of: SEQ ID NO: 76-232, 293-326 and 352-417, and at least one component selected from the group consisting of:
(a) instructions for use of the plurality of oligonucleotide primers in diagnosing the presence of prostate cancer;
(b) a device for providing a biological sample; and
(c) a container in which the plurality of oligonucleotide primers is held.

The application's sequence listing, which the Patent Office published only in electronic form, follows.

SEQUENCE LISTING (419 sequences)

SEQ ID NO: 1 - DNA, 1449 bp, Homo sapiens
ctggatagaacagctcaagccttgccacttcgggcttctcactgcagctgggcttggacttcggagttttgccattgccagtgggacgtctgagactttctccttcaagtacttggcagatcactctcttagcagggtctgcgcttcgcagccgggatgaagctggtttccgtcgccctgatgtacctgggttcgctcgccttcctaggcgctgacaccgctcggttggatgtcgcgtcggagtttcgaaagaagtggaataagtgggctctgagtcgtgggaagagggaactgcggatgtccagcagctaccccaccgggctcgctgacgtgaaggccgggcctgcccagacccttattcggccccaggacatgaagggtgcctctcgaagccccgaagacagcagtccggatgccgcccgcatccgagtcaagcgctaccgccagagcatgaacaacttccagggcctccggagctttggctgccgcttcgggacgtgcacggtgcagaagctggcacaccagatctaccagttcacagataaggacaaggacaacgtcgcccccaggagcaagatcagcccccagggctacggccgccggcgccggcgctccctgcccgaggccggcccgggtcggactctggtgtcttctaagccacaagcacacggggctccagcccccccgagtggaagtgctccccactttctttaggatttaggcgcccatggtacaaggaatagtcgcgcaagcatcccgctggtgcctcccgggacgaaggacttcccgagcggtgtggggaccgggctctgacagccctgcggagaccctgagtccgggaggcaccgtccggcggcgagctctggctttgcaagggcccctccttctgggggcttcgcttccttagccttgctcaggtgcaagtgccccagggggcggggtgcagaagaatccgagtgtttgccaggcttaaggagaggagaaactgagaaatgaatgctgagacccccggagcaggggtctgagccacagccgtgctcgcccacaaactgatttctcacggcgtgtcaccccaccagggcgcaagcctcactattacttgaactttccaaaacctaaagaggaaaagtgcaatgcgtgttgtacatacagaggtaactatcaatatttaagtttgttgctgtcaagattttttttgtaacttcaaatatagagatatttttgtacgttatatattgtattaagggcattttaaaagcaattatattgtcctcccctattttaagacgtgaatgtctcagcgaggtgtaaagttgttcgccgcgtggaatgtgagtgtgtttgtgtgcatgaaagagaaagactgattacctcctgtgtggaagaaggaaacaccgagtctctgtataatctatttacataaaatgggtgatatgcgaacagcaaacc

SEQ ID NO: 2 - DNA, 996 bp, Homo sapiens
aatcacttggggaaaggaaggttcgtttctgagttagcaacaagtaaatgcagcactagtgggtgggattgaggtatgccctggtgcataaatagagactcagctgtgctggcacactcagaagcttggaccgcatcctagccgccgactcacacaaggcaggtgggtgaggaaatccagagttgccatggagaaaattccagtgtcagcattcttgctccttgtggccctctcctacactctggccagagataccacagtcaaacctggagccaaaaaggacacaaaggactctcgacccaaactgccccagaccctctccagaggttggggtgaccaactcatctggactcagacatatgaagaagctctatataaatccaagacaagcaacaaacccttgatgattattcatcacttggatgagtgcccacacagtcaagctttaaagaaagtgtttgctgaaaataaagaaatccagaaattggcagagcagtttgtcctcctcaatctggtttatgaaacaactgacaaacacctttctcctgatggccagtatgtccccaggattatgtttgttgacccatctctgacagttagagccgatatcactggaagatattcaaatcgtctctatgcttacgaacctgcagatacagctctgttgcttgacaacatgaagaaagctctcaagttgctgaagactgaattgtaaagaaaaaaaatctccaagcccttctgtctgtcaggccttgagacttgaaaccagaagaagtgtgagaagactggctagtgtggaagcatagtgaacacactgattaggttatggtttaatgttacaacaactattttttaagaaaaacaagttttagaaatttggtttcaagtgtacatgtgtgaaaacaatattgtatactaccatagtgagccatgattttctaaaaaaaaaaataaatgttttgggggtgttctgttttctccaaaaaaaaaaaaaaa

SEQ ID NO: 3 - DNA, 1251 bp, Homo sapiens
gcccattgtttttgtaatctctgaggagaagcagcagcaaacatttgctagtcagacaagtgacagggaatggattccaaacaccagtgtgtaaagctaaatgatggccacttcatgcctgtattgggatttggcacctatgcacctccagaggttccgagaagtaaagctttggaggtcacaaaattagcaatagaagctgggttccgccatatagattctgctcatttatacaataatgaggagcaggttggactggccatccgaagcaagattgcagatggcagtgtgaagagagaagacatattctacacttcaaagctttggtccacttttcatcgaccagagttggtccgaccagccttggaaaactcactgaagaaagctcaattggactatgttgacctctatcttattcattctccaatgtctctaaagccaggtgaggaactttcaccaacagatgaaaatggaaaagtaatatttgacatagtggatctctgtaccacctgggaggccatggagaagtgtaaggatgcaggattggccaagtccattggggtgtcaaacttcaaccgcaggcagctggagatgatcctcaacaagccaggactcaagtacaagcctgtctgcaaccaggtagaatgtcatccgtatttcaaccggagtaaattgctagatttctgcaagtcgaaagatattgttctggttgcctatagtgctctgggatctcaacgagacaaacgatgggtggacccgaactccccggtgctcttggaggacccagtcctttgtgccttggcaaaaaagcacaagcgaaccccagccctgattgccctgcgctaccagctgcagcgtggggttgtggtcctggccaagagctacaatgagcagcgcatcagacagaacgtgcaggtttttgagttccagttgactgcagaggacatgaaagccatagatggcctagacagaaatctccactattttaacagtgatagttttgctagccaccctaattatccatattcagatgaatattaacatggagggctttgcctgatgtctaccagaagccctgtgtgtggatggtgacgcagaggacgtctctatgccggtgactggacatatcacctctacttaaatccgtcctgtttagcgacttcagtcaactacagctgagtccataggccagaaagacaataaatttttatcattttgaaataaaaaaaaaaaaaaaaaaaaaaaaaaaaa

SEQ ID NO: 4 - DNA, 464 bp, Homo sapiens
ctccccagcctgataaaggtcctgcgggcaggacaggacctcccaaccaagccctccagcaaggattcagagtgcccctccggcctcgccatgaggctcttcctgtcgctcccggtcctggtggtggttctgtcgatcgtcttggaaggcccagccccagcccaggggaccccagacgtctccagtgccttggataagctgaaggagtttggaaacacactggaggacaaggctcgggaactcatcagccgcatcaaacagagtgaactttctgccaagatgcgggagtggttttcagagacatttcagaaagtgaaggagaaactcaagattgactcatgaggacctgaagggtgacatcccaggaggggcctctgaaatttcccacaccccagcgcctgtgctgaggactccctccatgtggccccaggtgccaccaataaaaatcctacagaaaattcaaa

SEQ ID NO: 5 - DNA, 1223 bp, Homo sapiens
gggatccttgagtcctactcagccccagcggaggtgaaggacgtccttccccaggagccgactggccaatcacaggcaggaagatgaaggttctgtgggctgcgttgctggtcacattcctggcaggatgccaggccaaggtggagcaagcggtggagacagagccggagcccgagctgcgccagcagaccgagtggcagagcggccagcgctgggaactggcactgggtcgcttttgggattacctgcgctgggtgcagacactgtctgagcaggtgcaggaggagctgctcagctcccaggtcacccaggaactgagggcgctgatggacgagaccatgaaggagttgaaggcctacaaatcggaactggaggaacaactgaccccggtggcggaggagacgcgggcacggctgtccaaggagctgcaggcggcgcaggcccggctgggcgcggacatggaggacgtgtgcggccgcctggtgcagtaccgcggcgaggtgcaggccatgctcggccagagcaccgaggagctgcgggtgcgcctcgcctcccacctgcgcaagctgcgtaagcggctcctccgcgatgccgatgacctgcagaagcgcctggcagtgtaccaggccggggcccgcgagggcgccgagcgcggcctcagcgccatccgcgagcgcctggggcccctggtggaacagggccgcgtgcgggccgccactgtgggctccctggccggccagccgctacaggagcgggcccaggcctggggcgagcggctgcgcgcgcggatggaggagatgggcagccggacccgcgaccgcctggacgaggtgaaggagcaggtggcggaggtgcgcgccaagctggaggagcaggcccagcagatacgcctgcaggccgaggccttccaggcccgcctcaagagctggttcgagcccctggtggaagacatgcagcgccagtgggccgggctggtggagaaggtgcaggctgccgtgggcaccagcgccgcccctgtgcccagcgacaatcactgaacgccgaagcctgcagccatgcgaccccacgccaccccgtgcctcctgcctccgcgcagcctgcagcgggagaccctgtccccgccccagccgtcctcctggggtggaccctagtttaataaagattcaccaagtttcacgcaaaaaaaaaaaaaaaaaaaaaaaaaaaaaaaaaaaaaaaaaaaa

SEQ ID NO: 6 - DNA, 10661 bp, Homo sapiens
cgagatcccggggagccagcttgctgggagagcgggacggtccggagcaagcccagaggcagaggaggcgacagagggaaaaagggccgagctagccgctccagtgctgtacaggagccgaagggacgcaccacgccagccccagcccggctccagcgacagccaacgcctcttgcagcgcggcggcttcgaagccgccgcccggagctgccctttcctcttcggtgaagtttttaaaagctgctaaagactcggaggaagcaaggaaagtgcctggtaggactgacggctgcctttgtcctcctcctctccaccccgcctccccccaccctgccttccccccctcccccgtcttctctcccgcagctgcctcagtcggctactctcagccaacccccctcaccacccttctccccacccgcccccccgcccccgtcggcccagcgctgccagcccgagtttgcagagaggtaactccctttggctgcgagcgggcgagctagctgcacattgcaaagaaggctcttaggagccaggcgactggggagcggcttcagcactgcagccacgacccgcctggttaggctgcacgcggagagaaccctctgttttcccccactctctctccacctcctcctgccttccccaccccgagtgcggagccagagatcaaaagatgaaaaggcagtcaggtcttcagtagccaaaaaacaaaacaaacaaaaacaaaaaagccgaaataaaagaaaaagataataactcagttcttatttgcacctacttcagtggacactgaatttggaaggtggaggattttgtttttttcttttaagatctgggcatcttttgaatctacccttcaagtattaagagacagactgtgagcctagcagggcagatcttgtccaccgtgtgtcttcttctgcacgagactttgaggctgtcagagcgctttttgcgtggttgctcccgcaagtttccttctctggagcttcccgcaggtgggcagctagctgcagcgactaccgcatcatcacagcctgttgaactcttctgagcaagagaaggggaggcggggtaagggaagtaggtggaagattcagccaagctcaaggatggaagtgcagttagggctgggaagggtctaccctcggccgccgtccaagacctaccgaggagctttccagaatctgttccagagcgtgcgcgaagtgatccagaacccgggccccaggcacccagaggccgcgagcgcagcacctcccggcgccagtttgctgctgctgcagcagcagcagcagcagcagcagcagcagcagcagcagcagcagcagcagcagcagcagcagcagcaagagactagccccaggcagcagcagcagcagcagggtgaggatggttctccccaagcccatcgtagaggccccacaggctacctggtcctggatgaggaacagcaaccttcacagccgcagtcggccctggagtgccaccccgagagaggttgcgtcccagagcctggagccgccgtggccgccagcaaggggctgccgcagcagctgccagcacctccggacgaggatgactcagctgccccatccacgttgtccctgctgggccccactttccccggcttaagcagctgctccgctgaccttaaagacatcctgagcgaggccagcaccatgcaactccttcagcaacagcagcaggaagcagtatccgaaggcagcagcagcgggagagcgagggaggcctcgggggctcccacttcctccaaggacaattacttagggggcacttcgaccatttctgacaacgccaaggagttgtgtaaggcagtgtcggtgtccatgggcctgggtgtggaggcgttggagcatctgagtccaggggaacagcttcggggggattgcatgtacgccccacttttgggagttccacccgctgtgcgtcccactccttgtgccccattggccgaatgcaaaggttctctgctagacgacagcgcaggcaagagcactgaagatactgctgagtattcccctttcaagggaggttacaccaaagggctagaaggcgagagcctaggctgctctggcagcgctgcagcagggagctccgggacacttgaactgccgtctaccctgtctctctacaagtccggagcactggacgaggcagctgcgtaccagagtcgcgactactacaactttccactggctctggccggaccgccgccccctccgccgcctccccatccccacgctcgcatcaagctggagaacccgctggactacggcagcgcctgggcggctgcggcggcgcagtgccgctatggggacctggcgagcctgcatggcgcgggtgcagcgggacccggttctgggtcaccctcagccgccgcttcctcatcctggcacactctcttcacagccgaagaaggccagttgtatggaccgtgtggtggtggtgggggtggtggcggcggcggcggcggcggcggcggcggcggcggcggcggcggcggcggcgaggcgggagctgtagccccctacggctacactcggccccctcaggggctggcgggccaggaaagcgacttcaccgcacctgatgtgtggtaccctggcggcatggtgagcagagtgccctatcccagtcccacttgtgtcaaaagcgaaatgggcccctggatggatagctactccggaccttacggggacatgcgtttggagactgccagggaccatgttttgcccattgactattactttccaccccagaagacctgcctgatctgtggagatgaagcttctgggtgtcactatggagctctcacatgtggaagctgcaaggtcttcttcaaaagagccgctgaagggaaacagaagtacctgtgcgccagcagaaatgattgcactattgataaattccgaaggaaaaattgtccatcttgtcgtcttcggaaatgttatgaagcagggatgactctgggagcccggaagctgaagaaacttggtaatctgaaactacaggaggaaggagaggcttccagcaccaccagccccactgaggagacaacccagaagctgacagtgtcacacattgaaggctatgaatgtcagcccatctttctgaatgtcctggaagccattgagccaggtgtagtgtgtgctggacacgacaacaaccagcccgactcctttgcagccttgctctctagcctcaatgaactgggagagagacagcttgtacacgtggtcaagtgggccaaggccttgcctggcttccgcaacttacacgtggacgaccagatggctgtcattcagtactcctggatggggctcatggtgtttgccatgggctggcgatccttcaccaatgtcaactccaggatgctctacttcgcccctgatctggttttcaatgagtaccgcatgcacaagtcccggatgtacagccagtgtgtccgaatgaggcacctctctcaagagtttggatggctccaaatcaccccccaggaattcctgtgcatgaaagcactgctactcttcagcattattccagtggatgggctgaaaaatcaaaaattctttgatgaacttcgaatgaactacatcaaggaactcgatcgtatcattgcatgcaaaagaaaaaatcccacatcctgctcaagacgcttctaccagctcaccaagctcctggactccgtgcagcctattgcgagagagctgcatcagttcacttttgacctgctaatcaagtcacacatggtgagcgtggactttccggaaatgatggcagagatcatctctgtgcaagtgcccaagatcctttctgggaaagtcaagcccatctatttccacacccagtgaagcattggaaaccctatttccccaccccagctcatgccccctttcagatgtcttctgcctgttataactctgcactactcctctgcagtgccttggggaatttcctctattgatgtacagtctgtcatgaacatgttcctgaattctatttgctgggctttttttttctctttctctcctttctttttcttcttccctccctatctaaccctcccatggcaccttcagactttgcttcccattgtggctcctatctgtgttttgaatggtgttgtatgcctttaaatctgtgatgatcctcatatggcccagtgtcaagttgtgcttgtttacagcactactctgtgccagccacacaaacgtttacttatcttatgccacgggaagtttagagagctaagattatctggggaaatcaaaacaaaaacaagcaaacaaaaaaaaaaagcaaaaacaaaacaaaaaataagccaaaaaaccttgctagtgttttttcctcaaaaataaataaataaataaataaatacgtacatacatacacacatacatacaaacatatagaaatccccaaagaggccaatagtgacgagaaggtgaaaattgcaggcccatggggagttactgattttttcatctcctccctccacgggagactttattttctgccaatggctattgccattagagggcagagtgaccccagagctgagttgggcaggggggtggacagagaggagaggacaaggagggcaatggagcatcagtacctgcccacagccttggtccctgggggctagactgctcaactgtggagcaattcattatactgaaaatgtgcttgttgttgaaaatttgtctgcatgttaatgcctcacccccaaacccttttctctctcactctctgcctccaacttcagattgactttcaatagtttttctaagacctttgaactgaatgttctcttcagccaaaacttggcgacttccacagaaaagtctgaccactgagaagaaggagagcagagatttaaccctttgtaaggccccatttggatccaggtctgctttctcatgtgtgagtcagggaggagctggagccagaggagaagaaaatgatagcttggctgttctcctgcttaggacactgactgaatagttaaactctcactgccactaccttttccccacctttaaaagacctgaatgaagttttctgccaaactccgtgaagccacaagcaccttatgtcctcccttcagtgttttgtgggcctgaatttcatcacactgcatttcagccatggtcatcaagcctgtttgcttcttttgggcatgttcacagattctctgttaagagcccccaccaccaagaaggttagcaggccaacagctctgacatctatctgtagatgccagtagtcacaaagatttcttaccaactctcagatcgctggagcccttagacaaactggaaagaaggcatcaaagggatcaggcaagctgggcgtcttgcccttgtcccccagagatgataccctcccagcaagtggagaagttctcacttccttctttagagcagctaaaggggctacccagatcagggttgaagagaaaactcaattaccagggtgggaagaatgaaggcactagaaccagaaaccctgcaaatgctcttcttgtcacccagcatatccacctgcagaagtcatgagaagagagaaggaacaaagaggagactctgactactgaattaaaatcttcagcggcaaagcctaaagccagatggacaccatctggtgagtttactcatcatcctcctctgctgctgattctgggctctgacattgcccatactcactcagattccccacctttgttgctgcctcttagtcagagggaggccaaaccattgagactttctacagaaccatggcttctttcggaaaggtctggttggtgtggctccaatactttgccacccatgaactcagggtgtgccctgggacactggttttatatagtcttttggcacacctgtgttctgttgacttcgttcttcaagcccaagtgcaagggaaaatgtccacctactttctcatcttggcctctgcctccttacttagctcttaatctcatctgttgaactcaagaaatcaagggccagtcatcaagctgcccattttaattgattcactctgtttgttgagaggatagtttctgagtgacatgatatgatccacaagggtttccttccctgatttctgcattgatattaatagccaaacgaacttcaaaacagctttaaataacaagggagaggggaacctaagatgagtaatatgccaatccaagactgctggagaaaactaaagctgacaggttccctttttggggtgggatagacatgttctggttttctttattattacacaatctggctcatgtacaggatcacttttagctgttttaaacagaaaaaaatatccaccactcttttcagttacactaggttacattttaataggtcctttacatctgttttggaatgattttcatcttttgtgatacacagattgaattatatcattttcatatctctccttgtaaatactagaagctctcctttacatttctctatcaaatttttcatctttatgggtttcccaattgtgactcttgtcttcatgaatatatgtttttcatttgcaaaagccaaaaatcagtgaaacagcagtgtaattaaaagcaacaactggattactccaaatttccaaatgacaaaactagggaaaaatagcctacacaagcctttaggcctactctttctgtgcttgggtttgagtgaacaaaggagattttagcttggctctgttctcccatggatgaaaggaggaggattttttttttcttttggccattgatgttctagccaatgtaattgacagaagtctcattttgcatgcgctctgctctacaaacagagttggtatggttggtatactgtactcacctgtgagggactggccactcagacccacttagctggtgagctagaagatgaggatcactcactggaaaagtcacaaggaccatctccaaacaagttggcagtgctcgatgtggacgaagagtgaggaagagaaaaagaaggagcaccagggagaaggctccgtctgtgctgggcagcagacagctgccaggatcacgaactctgtagtcaaagaaaagagtcgtgtggcagtttcagctctcgttcattgggcagctcgcctaggcccagcctctgagctgacatgggagttgttggattctttgtttcatagctttttctatgccataggcaatattgttgttcttggaaagtttattatttttttaactcccttactctgagaaagggatattttgaaggactgtcatatatctttgaaaaaagaaaatctgtaatacatatatttttatgtatgttcactggcactaaaaaatatagagagcttcattctgtcctttgggtagttgctgaggtaattgtccaggttgaaaaataatgtgctgatgctagagtccctctctgtccatactctacttctaaatacatataggcatacatagcaagttttatttgacttgtactttaagagaaaatatgtccaccatccacatgatgcacaaatgagctaacattgagcttcaagtagcttctaagtgtttgtttcattaggcacagcacagatgtggcctttccccccttctctcccttgatatctggcagggcataaaggcccaggccacttcctctgccccttcccagccctgcaccaaagctgcatttcaggagactctctccagacagcccagtaactacccgagcatggcccctgcatagccctggaaaaataagaggctgactgtctacgaattatcttgtgccagttgcccaggtgagagggcactgggccaagggagtggttttcatgtttgacccactacaaggggtcatgggaatcaggaatgccaaagcaccagatcaaatccaaaacttaaagtcaaaataagccattcagcatgttcagtttcttggaaaaggaagtttctacccctgatgcctttgtaggcagatctgttctcaccattaatctttttgaaaatcttttaaagcagtttttaaaaagagagatgaaagcatcacattatataaccaaagattacattgtacctgctaagataccaaaattcataagggcagggggggagcaagcattagtgcctctttgataagctgtccaaagacagactaaaggactctgctggtgactgacttataagagctttgtgggtttttttttccctaataatatacatgtttagaagaattgaaaataatttcgggaaaatgggattatgggtccttcactaagtgattttataagcagaactggctttccttttctctagtagttgctgagcaaattgttgaagctccatcattgcatggttggaaatggagctgttcttagccactgtgtttgctagtgcccatgttagcttatctgaagatgtgaaacccttgctgataagggagcatttaaagtactagattttgcactagagggacagcaggcagaaatccttatttctgcccactttggatggcacaaaaagttatctgcagttgaaggcagaaagttgaaatacattgtaaatgaatatttgtatccatgtttcaaaattgaaatatatatatatatatatatatatatatatatatatatatagtgtgtgtgtgtgttctgatagctttaactttctctgcatctttatatttggttccagatcacacctgatgccatgtacttgtgagagaggatgcagttttgttttggaagctctctcagaacaaacaagacacctggattgatcagttaactaaaagttttctcccctattgggtttgacccacaggtcctgtgaaggagcagagggataaaaagagtagaggacatgatacattgtactttactagttcaagacagatgaatgtggaaagcataaaaactcaatggaactgactgagatttaccacagggaaggcccaaacttggggccaaaagcctacccaagtgattgaccagtggccccctaatgggacctgagctgttggaagaagagaactgttccttggtcttcaccatccttgtgagagaagggcagtttcctgcattggaacctggagcaagcgctctatctttcacacaaattccctcacctgagattgaggtgctcttgttactgggtgtctgtgtgctgtaattctggttttggatatgttctgtaaagattttgacaaatgaaaatgtgtttttctctgttaaaacttgtcagagtactagaagttgtatctctgtaggtgcaggtccatttctgcccacaggtagggtgtttttctttgattaagagattgacacttctgttgcctaggacctcccaactcaaccatttctaggtgaaggcagaaaaatccacattagttactcctcttcagacatttcagctgagataacaaatcttttggaattttttcacccatagaaagagtggtagatatttgaatttagcaggtggagtttcatagtaaaaacagcttttgactcagctttgatttatcctcatttgatttggccagaaagtaggtaatatgcattgattggcttctgattccaattcagtatagcaaggtgctaggttttttcctttccccacctgtctcttagcctggggaattaaatgagaagccttagaatgggtggcccttgtgacctgaaacacttcccacataagctacttaacaagattgtcatggagctgcagattccattgcccaccaaagactagaacacacacatatccatacaccaaaggaaagacaattctgaaatgctgtttctctggtggttccctctctggctgctgcctcacagtatgggaacctgtactctgcagaggtgacaggccagatttgcattatctcacaaccttagcccttggtgctaactgtcctacagtgaagtgcctggggggttgtcctatcccataagccacttggatgctgacagcagccaccatcagaatgacccacgcaaaaaaaagaaaaaaaaaattaaaaagtcccctcacaacccagtgacacctttctgctttcctctagactggaacattgattagggagtgcctcagacatgacattcttgtgctgtccttggaattaatctggcagcaggagggagcagactatgtaaacagagataaaaattaattttcaatattgaaggaaaaaagaaataagaagagagagagaaagaaagcatcacacaaagattttcttaaaagaaacaattttgcttgaaatctctttagatggggctcatttctcacggtggcacttggcctccactgggcagcaggaccagctccaagcgctagtgttctgttctctttttgtaatcttggaatcttttgttgctctaaatacaattaaaaatggcagaaacttgtttgttggactacatgtgtgactttgggtctgtctctgcctctgctttcagaaatgtcatccattgtgtaaaatattggcttactggtctgccagctaaaacttggccacatcccctgttatggctgcaggatcgagttattgttaacaaagagacccaagaaaagctgctaatgtcctcttatcattgttgttaatttgttaaaacataaagaaatctaaaatttcaaaaaa

SEQ ID NO: 7 - DNA, 929 bp, Homo sapiens
cggttgtggtcgctatatataaggtggggaggccgccggcccgttcggttccgggcgttaccatcgtccgtgcgcaccgcccggcgtccaggtgagtctcccatctgcagagacgcggacgcgccggcccgcagttggcctgcggagcgcggtggacggtttggcgcccaccaggcgatcaatactttggatttttaatttctagatttggcaattcttcgctgaagtcatcatgagctttttccaactcctgatgaaaaggaaggaactcattcccttggtggtgttcatgactgtggcggcgggtggagcctcatctttcgctgtgtattctctttggaaaaccgatgtgatccttgatcgaaaaaaaaatccagaaccttgggaaactgtggaccctactgtacctcaaaagcttataacaatcaaccaacaatggaaacccattgaagagttgcaaaatgtccaaagggtgaccaaatgacgagccctcgcctctttcttctgaagagtactctataaatctagtggaaacatttctgcacaaactagattctggacaccagtgtgcggaaatgcttctgctacatttttagggtttgtctacattttttgggctctggataaggaattaaaggagtgcagcaataactgcactgtctaaaagtttgtgcttattttcttgtaaatttgaatattgcatattgaaatttttgtttatgatctatgaatgtttttcttaaaatttacaaagctttgtaaattagattttctttaataaaatgccatttgtgcaagatttctcaaagattaggtatatatttaaatggaagagaaaatatttttatgggagaaaaatacatttgaaccatgaaatttcatcttttaaataacatccagtacagatttctgtgtaaaaaaaaaaaaaa

SEQ ID NO: 8 - DNA, 2231 bp, Homo sapiens
aaaacaggaaataggtgtttcatatatacggctctaaccttctctctctgcaccttccttctgtcaatagatgaaacaaatacttcatcctgctctggaaaccactgatccctgttccaccggttttgttttcccagcaatgacattattcccagtgctgttgttcctggttgctgggctgcttccatcttttccagcaaatgaagataaggatcccgcttttactgctttgttaaccacccaaacacaagtgcaaagggagattgtgaataagcacaatgaactgaggagagcagtatctccccctgccagaaacatgctgaagatggaatggaacaaagaggctgcagcaaatgcccaaaagtgggcaaaccagtgcaattacagacacagtaacccaaaggatcgaatgacaagtctaaaatgtggtgagaatctctacatgtcaagtgcctccagctcatggtcacaagcaatccaaagctggtttgatgagtacaatgattttgactttggtgtagggccaaagactcccaacgcagtggttggacattatacacaggttgtttggtactcttcatacctcgttggatgtggaaatgcctactgtcccaatcaaaaagttctaaaatactactatgtttgccaatattgtcctgctggtaattgggctaatagactatatgtcccttatgaacaaggagcaccttgtgccagttgcccagataactgtgacgatggactatgcaccaatggttgcaagtacgaagatctctatagtaactgtaaaagtttgaagctcacattaacctgtaaacatcagttggtcagggacagttgcaaggcctcctgcaattgttcaaacagcatttattaaatacgcattacacaccgagtagggctatgtagagaggagtcagattatctacttagatttggcatctacttagatttaacatatactagctgagaaattgtaggcatgtttgatacacatttgatttcaaatgtttttcttctggatctgctttttattttacaaaaatatttttcatacaaatggttaaaaagaaacaaaatctataacaacaactttggatttttatatataaactttgtgatttaaatttactgaatttaattagggtgaaaattttgaaagttgtattctcatatgactaagttcactaaaaccctggattgaaagtgaaaattatgttcctagaacaaaatgtacaaaaagaacaatataattttcacatgaacccttggctgtagttgcctttcctagctccactctaaggctaagcatcttcaaagacgttttcccatatgctgtcttaattcttttcactcattcacccttcttcccaatcatctggctggcatcctcacaattgagttgaagctgttcctcctaaaacaatcctgacttttattttgccaaaatcaatacaatcctttgaattttttatctgcataaattttacagtagaatatgatcaaaccttcatttttaaacctctcttctctttgacaaaacttccttaaaaaagaatacaagataatataggtaaataccctccactcaaggaggtagaactcagtcctctcccttgtgagtcttcactaaaatcagtgactcacttccaaagagtggagtatggaaagggaaacatagtaactttacaggggagaaaaatgacaaatgacgtcttcaccaagtgatcaaaattaacgtcaccagtgataagtcattcagatttgttctagataatctttctaaaaattcataatcccaatctaattatgagctaaaacatccagcaaactcaagttgaaggacattctacaaaatatccctggggtattttagagtattcctcaaaactgtaaaaatcatggaaaataagggaatcctgagaaacaatcacagaccacatgagactaaggagacatgtgagccaaatgcaatgtgcttcttggatcagatcctggaacagaaaaagatcagtaatgaaaaaactgatgaagtctgaatagaatctggagtatttttaacagtagtgttgatttcttaatcttgataaatatagcagggtaatgtaagatgataacgttagagaaactgaaactgggtgagggctatctaggaattctctgtactatcttaccaaattttcggtaagtctaagaaagcaatgcaaaataaaaagtgtcttgaaaaaaaa

SEQ ID NO: 9 - DNA, 1975 bp, Homo sapiens
aactgtcactgtggagaggagagagagaggacagagagcaagtcactcccggctgcctttttcacctctgacagagcccagacaccatgaacgcaagtgaattccgaaggagagggaaggagatggtggattacgtggccaactacatggaaggcattgagggacgccaggtctaccctgacgtggagcccgggtacctgcggccgctgatccctgccgctgcccctcaggagccagacacgtttgaggacatcatcaacgacgttgagaagataatcatgcctggggtgacgcactggcacagcccctacttcttcgcctacttccccactgccagctcgtacccggccatgcttgcggacatgctgtgcggggccattggctgcatcggcttctcctgggcggcaagcccagcatgcacagagctggagactgtgatgatggactggctcgggaagatgctggaactaccaaaggcatttttgaatgagaaagctggagaagggggaggagtgatccagggaagtgccagtgaagccaccctggtggccctgctggccgctcggaccaaagtgatccatcggctgcaggcagcgtccccagagctcacacaggccgctatcatggagaagctggtggcttactcatccgatcaggcacactcctcagtggaaagagctgggttaattggtggagtgaaattaaaagccatcccctcagatggcaacttcgccatgcgtgcgtctgccctgcaggaagccctggagagagacaaagcggctggcctgattcctttctttatggttgccaccctggggaccacaacatgctgctcctttgacaatctcttagaagtcggtcctatctgcaacaaggaagacatatggctgcacgttgatgcagcctacgcaggcagtgcattcatctgccctgagttccggcaccttctgaatggagtggagtttgcagattcattcaactttaatccccacaaatggctattggtgaattttgactgttctgccatgtgggtgaaaaagagaacagacttaacgggagcctttagactggaccccacttacctgaagcacagccatcaggattcagggcttatcactgactaccggcattggcagataccactgggcagaagatttcgctctttgaaaatgtggtttgtatttaggatgtatggagtcaaaggactgcaggcttatatccgcaagcatgtccagctgtcccatgagtttgagtcactggtgcgccaggatccccgctttgaaatctgtgtggaagtcattctggggcttgtctgctttcggctaaagggttccaacaaagtgaatgaagctcttctgcaaagaataaacagtgccaaaaaaatccacttggttccatgtcacctcagggacaagtttgtcctgcgctttgccatctgttctcgcacggtggaatctgcccatgtgcagcgggcctgggaacacatcaaagagctggcggccgacgtgctgcgagcagagagggagtaggagtgaagccagctgcaggaatcaaaaattgaagagagatatatctgaaaactggaataagaagcaaataaatatcatcctgccttcatggaactcagctgtctgtggcttcccatgtctttctccaaagttatccagagggttgtgattttgtctgcttagtatctcatcaacaaagaaatattatttgctaattaaaaagttaatcttcatggccatagcttttattcattagctgtgatttttgttgattaaaacattatagattttcatgttcttgcagtcatcagaagtggtaggaaagcctcactgatatattttccagggcaatcaatgttcacgcaacttgaaattatatctgtggtcttcaaattgtcttttgtcatgtggctaaatgcctaataaacaattcaagtgaaatactaaaaaaaaaaaaaaaaaaaaaa

SEQ ID NO: 10 - DNA, 6114 bp, Homo sapiens
gtcatgcatacattagagcctctgatgagtttgtctttggggactctggggctgtactacccagtgtcatcacaaattaccaggagaaattgcttccagctcacaatcacatctgcttttggcaagaactaatgcaccaagacttcaagttctaagcctctgttcagattttaattgcaattgatcaggtttatattattgtacctccagagacctcctagagccagaacccggctggcttgctgtttcctttagagcagcgcatatcattatttggtgttctggtggaggacttttctgatggcagaaattagtttctctgggttcatcaggacgggatgcttcaagatttaagtgcaagtgtcttctttccaccttgttcacaacacagaacgttagctcaggtacctgacaatgatgagcagtttgtaccagactatcaggctgaaagtttggcttttcatggcctgccactgaaaatcaagaaagaaccccacagtccatgttcagaaatcagctctgcctgcagtcaagaacagccctttaaattcagctatggagaaaagtgcctgtacaatgtcagatttcgccgccagctttctgaaccctgtaactcctttcctcctttgccgacgatgccaagggaaggacgtcctatgtaccaacgccagatgtctgagccaaacatccccttcccaccacaaggctttaagcaggagtaccacgacccagtgtatgaacacaacaccatggttggcagtgcggccagccaaagctttccccctcctctgatgattaaacaggaacccagagattttgcatatgactcagaagtgcctagctgccactccatttatatgaggcaagaaggcttcctggctcatcccagcagaacagaaggctgtatgtttgaaaagggccccaggcagttttatgatgacacctgtgttgtcccagaaaaattcgatggagacatcaaacaagagccaggaatgtatcgggaaggacccacataccaacggcgaggatcacttcagctctggcagtttttggtagctcttctggatgacccttcaaattctcattttattgcctggactggtcgaggcatggaatttaaactgattgagcctgaagaggtggcccgacgttggggcattcagaaaaacaggccagctatgaactatgataaacttagccgttcactccgctattactatgagaaaggaattatgcaaaaggtggctggagagagatatgtctacaagtttgtgtgtgatccagaagcccttttctccatggcctttccagataatcagcgtccactgctgaagacagacatggaacgtcacatcaacgaggaggacacagtgcctctttctcactttgatgagagcatggcctacatgccggaagggggctgctgcaacccccacccctacaacgaaggctacgtgtattaacacaagtgacagtcaagcagggcgtttttgcgcttttccttttttctgcaagatacagagaattgctgaatctttgttttatttctgttgtttgtattttatttttaaataataatacacaaaaaggggcttttcctgttgcattattctatggtctgccatggactgtgcactttatttgagggtgggtgggagtaatctaaacatttattctgtgtaacaggaagctaatgggtgaatgggcagagggatttggggattactttttacttaggcttgggatggggtcctacaagttttgagtatgatgaaactatatcatgtctgtttgatttcataacaacataagataatgtttattttatcggggtatctatggtacagttaatttcacgttgtgtaaatatccacttggagactatttgccttgggcattttcccctgtcatttatgagtctctgcaggtgtacaaaaaaaccccaatctactgtaaatggcagtttaattgttagaaatgactgtttttgcaccacttgtaaaaaggtatttagcgattgcatttgctgtttgttgttttattttgctttatatatgacttgcagaggataaccataaaatgggtaattctctctgaagttgaataatcaccatgactgtaaatgaggggcacaattttggactctggcgccaaactgagtcataggccagtagcattacgtgtatctggtgccaccttgctgtttagatacaaatcataccgtcttttaaatattttgaagcccatttcagttaaataatgacatgtcatggtcctttggaatcttcatttaaatgttaaatctggaatcaaaatgaagcaaaaaatatctgtctccttttcactttcttcagtacataaatacattatttaatcaataagaattaactgtactaaatcatgtattatgctgttctagttacagcaaacactctttaagaaaaatatccaatacactaaataggtactatagtaatttttagacatggtacccattgatatgcatttaaaccttttactgctgtgttatgttgataacatatataaatattagataatgctaatgcttctgctgctgtcttttctgtaatattctctttcatgctgaatttactatgaccatttataagcagtgcagttaactacagatagcatttcaggacaaaatagatgactcaaaccatttattgcttaaaaaatagcttacgccatgctatgctataagcagcttttatgcacattgacaaatgaagagtaagcttcagcttgctaaaggaaactgtggaaccttttgtaacttttggtgatatggaaaattatttacaaaccgtcaaagaatatgaggaagttgctgtatgacatagtgctggcactgatattatccatcatctctttttggacacttctgtaaatgtgattggattgtttgaaagaagatttaaagtttcaaagttttttgttctgtttttgctttgcatttggagaaaatattgaaagcagggtatgttgtttcattcaccttgaaaaaaccatgagtaaatggggatatagaatctctgaatagctcgctaaaagattcaagcaagggacatgaattttgttccatctatcaataatatccagaagaacaacttttttaaagagtctatagcaaaaagcaaaaaaaaaaaaaaattctaaacacaaagtcaaaataaacctattgtaaaagcatttcgtgatgagcatgaaaaagattgtttaaagatgatccccccagctacccattttccaaaactacacagatcacagctcatttctctaagtggagcagttatcaagaaacccaaacaccaaaattgctactcttcacatttaatcctacaaaaagtactccaatttcaaaatatgtatgtaacctgcgatttcaatgattgttgttcatatacatcatgtattattttggcccattttgggcctaaaaaagaaaactatgccttaaaaatcagaaccttttctccccactatgcttatgtggccatctacagcacttagaataaaaacagatgttaaaatattcagtgaaagttttattggaaaaaggaattgagatatataattgagatttggtgaaattgaaggagaaaatttaagtgagtctttaaaatatattctgaatgaaaactgtattgaggattcatttttgttccttttttttctttttctcttttctcctttttcttctttttaatagtctagttttagtcagtcagtgaggaagaattgggccatgctaacgttatcacaagagaacaatggcagaaatggtattagttatataatatttaaggacaaactatatgttttgctgttttaacgtagtgactcactgaactaaatacataattgaccaacattaagtgtatttccaatacagaagggttgaaaatattacattataaactcttttgaaaaatgtatctaaaattttttaagttctgttttgattccactttttggttgagtttttatgtttttgttttcaggtagattaataaatctggcagctgatttctgcaagattcttgtgttttgaatttctcattgaattggctactcaaacatagaaatcatttgttaatgatgtaatgtcttctctcagcttttatcttcactgctgtttgctgtctcttgatgatgacatgttaatacccaatagattaattgcaacaaacacttatactcaaataactaagtaaaaataatttttcttgttatgtccatgaaaagtgcttcagaataaaaatccacaagactgacagtgcagaacatttttctcaaatcatgggcggatcttggaggtctagtttcccgtagatgctgtaaccaattaccacaacttcagtaatttacacaaatttatcttatagttctggaggcagaagttcaaaagaagccttaagagactaaaaccaagatgtccttaggtctggttccttctggaggctccaggggagattcttccagctttcacttctagagtctgctgacattccttggctcctggctacatcacttcaatctctgcttccatggtcacatactcttctactatagtcaaatttccttcctgcctcttataaggatgcttgtgattacatttaggggatgctcagataatccaggacaatctctccatctcaagatccttaacttaatgacgtgtgccaagtccctttggctagataattattcataggtcccagggattaggacatggatgtaaggggtgagggcagggctgttattcagaacaccgcacggaggaggaagactgtgtagcaaagactctaattgatttactcaggaacagtggagttctgctgagggatctaggatttgaaagtactagagtttgcttttatttaccactgagatattttccccttattctgcataaataattttgaaaactttctatattaaatttcaactattccactaaaatgtctggtaatcacatcaagcctttagattattcaaatccttccccagcccccaggaaaacactaagtcatgaaacagaaaaacagaaggtatgataataatagtaataacagttaaatcagtggtctaatccagattttattttttaatacatttcttttggtgttaatatgggttactatgtgatcttatcatttgctagtgattattacttattaggtaagaacaatgtgtaaaatatgtctattactcaaaagaacaattgcaaaatgagtcaacttatctttatataaccaggaaagaaatatattgccagaagctacagaattttgccagatgatagggatttctaaaatgagccactttgtctatcatgcagccttttcagagcttgtaatgagaaaacattacagaggagaaggtcatttggatgtttgttacttggaatcctagaaaacaaaaactaaaatttaaaaataagaagtgagtaagctattttccatttgcgatttggtatggagaagagaggaaatagaattattaaaaaaatacaaattgggtaaaagtgatggtggaaaaaatataaagaaggcaaatgtacatattaagcaattctactaagaattggaaaaatcaagtttcaaaaagatggtaatagttgggcatgatactagaaaatttcacccagtttattcagagctcaactagtacttttaggacttctttttttatatacatgagactcactttgacatacttaaaaaaaaaacagtttatggaaagtacagtttaagaggagaatttgattagactaagtggatatctttatagaaatattaatgatttcagaattttcagttacaagtgtatataccgtggctattgtttatggattcatatgtaaggtagggtcttttttgcatatagactccagtattagttactttcattctaaaattatatttatgcttctatggggaagaaaatttttaattcacttggttgtattaaaattatacttacggtttgagaaaacatgctatgaaaatcatgattatagcaaattaaatatgctcaaaatttaaatctaaaataaaagcccagaaactgaaaaaaaaaaaaaaaaaa

SEQ ID NO: 11 - DNA, 2298 bp, Homo sapiens
cacgttcttatgtaaccgagcccgggtaaagcagggctgcagaaagcagaaacggcgagcccggctcctgggagcaggtctcggcccccgcttggggccccggccgtgcggccggagggagcggccggatggagcggaggatgaaagccggatacttggaccagcaagtgccctacaccttcagcagcaaatcgcccggaaatgggagcttgcgcgaagcgctgatcggcccgctggggaagctcatggacccgggctccctgccgcccctcgactctgaagatctcttccaggatctaagtcacttccaggagacgtggctcgctgaagctcaggtaccagacagtgatgagcagtttgttcctgatttccattcagaaaacctagctttccacagccccaccaccaggatcaagaaggagccccagagtccccgcacagacccggccctgtcctgcagcaggaagccgccactcccctaccaccatggcgagcagtgcctttactccagtgcctatgacccccccagacaaatcgccatcaagtcccctgcccctggtgcccttggacagtcgcccctacagccctttccccgggcagagcaacggaatttcctgagatcctctggcacctcccagccccaccctggccatgggtacctcggggaacatagctccgtcttccagcagcccctggacatttgccactccttcacatctcagggagggggccgggaacccctcccagccccctaccaacaccagctgtcggagccctgcccaccctatccccagcagagctttaagcaagaataccatgatcccctgtatgaacaggcgggccagccagccgtggaccagggtggggtcaatgggcacaggtacccaggggcgggggtggtgatcaaacaggaacagacggacttcgcctacgactcagatgtcaccgggtgcgcatcaatgtacctccacacagagggcttctctgggccctctccaggtgacggggccatgggctatggctatgagaaacctctgcgaccattcccagatgatgtctgcgttgtccctgagaaatttgaaggagacatcaagcaggaaggggtcggtgcatttcgagaggggccgccctaccagcgccggggtgccctgcagctgtggcaatttctggtggccttgctggatgacccaacaaatgcccatttcattgcctggacgggccggggaatggagttcaagctcattgagcctgaggaggtcgccaggctctggggcatccagaagaaccggccagccatgaattacgacaagctgagccgctcgctccgatactattatgagaaaggcatcatgcagaaggtggctggtgagcgttacgtgtacaagtttgtgtgtgagcccgaggccctcttctctttggccttcccggacaatcagcgtccagctctcaaggctgagtttgaccggcctgtcagtgaggaggacacagtccctttgtcccacttggatgagagccccgcctacctcccagagctggctggccccgcccagccatttggccccaagggtggctactcttactagcccccagcggctgttccccctgccgcaggtgggtgctgccctgtgtacatataaatgaatctggtgttggggaaaccttcatctgaaacccacagatgtctctggggcagatccccactgtcctaccagttgccctagcccagactctgagctgctcaccggagtcattgggaaggaaaagtggagaaatggcaagtctagagtctcagaaactcccctgggggtttcacctgggccctggaggaattcagctcagcttcttcctaggtccaagccccccacaccttttccccaaccacagagaacaagagtttgttctgttctgggggacagagaaggcgcttcccaacttcatactggcaggagggtgaggaggttcactgagctccccagatctcccactgcggggagacagaagcctggactctgccccacgctgtggccctggagggtcccggtttgtcagttcttggtgctctgtgttcccagaggcaggcggaggttgaagaaaggaacctgggatgaggggtgctgggtataagcagagagggatgggttcctgctccaagggaccctttgcctttcttctgccctttcctaggcccaggcctgggtttgtacttccacctccaccacatctgccagaccttaataaaggcccccacttctcccattaaaaaaaaaaaaaaaaaaaaaaaaaaaaaaaaaaaaaaaa

SEQ ID NO: 12 - DNA, 9179 bp, Homo sapiens
gcaagaactgcaggggaggaggacgctgccacccacagcctctagagctcattgcagctgggacagcccggagtgtggttagcagctcggcaagcgctgcccaggtcctggggtggtggcagccagcgggagcaggaaaggaagcatgttcccaggctgcccacgcctctgggtcctggtggtcttgggcaccagctgggtaggctgggggagccaagggacagaagcggcacagctaaggcagttctacgtggctgctcagggcatcagttggagctaccgacctgagcccacaaactcaagtttgaatctttctgtaacttcctttaagaaaattgtctacagagagtatgaaccatattttaagaaagaaaaaccacaatctaccatttcaggacttcttgggcctactttatatgctgaagtcggagacatcataaaagttcactttaaaaataaggcagataagcccttgagcatccatcctcaaggaattaggtacagtaaattatcagaaggtgcttcttaccttgaccacacattccctgcggagaagatggacgacgctgtggctccaggccgagaatacacctatgaatggagtatcagtgaggacagtggacccacccatgatgaccctccatgcctcacacacatctattactcccatgaaaatctgatcgaggatttcaactcggggctgattgggcccctgcttatctgtaaaaaagggaccctaactgagggtgggacacagaagacgtttgacaagcaaatcgtgctactatttgctgtgtttgatgaaagcaagagctggagccagtcatcatccctaatgtacacagtcaatggatatgtgaatgggacaatgccagatataacagtttgtgcccatgaccacatcagctggcatctgctgggaatgagctcggggccagaattattctccattcatttcaacggccaggtcctggagcagaaccatcataaggtctcagccatcacccttgtcagtgctacatccactaccgcaaatatgactgtgggcccagagggaaagtggatcatatcttctctcaccccaaaacatttgcaagctgggatgcaggcttacattgacattaaaaactgcccaaagaaaaccaggaatcttaagaaaataactcgtgagcagaggcggcacatgaagaggtgggaatacttcattgctgcagaggaagtcatttgggactatgcacctgtaataccagcgaatatggacaaaaaatacaggtctcagcatttggataatttctcaaaccaaattggaaaacattataagaaagttatgtacacacagtacgaagatgagtccttcaccaaacatacagtgaatcccaatatgaaagaagatgggattttgggtcctattatcagagcccaggtcagagacacactcaaaatcgtgttcaaaaatatggccagccgcccctatagcatttaccctcatggagtgaccttctcgccttatgaagatgaagtcaactcttctttcacctcaggcaggaacaacaccatgatcagagcagttcaaccaggggaaacctatacttataagtggaacatcttagagtttgatgaacccacagaaaatgatgcccagtgcttaacaagaccatactacagtgacgtggacatcatgagagacatcgcctctgggctaataggactacttctaatctgtaagagcagatccctggacaggcgaggaatacagagggcagcagacatcgaacagcaggctgtgtttgctgtgtttgatgagaacaaaagctggtaccttgaggacaacatcaacaagttttgtgaaaatcctgatgaggtgaaacgtgatgaccccaagttttatgaatcaaacatcatgagcactatcaatggctatgtgcctgagagcataactactcttggattctgctttgatgacactgtccagtggcacttctgtagtgtggggacccagaatgaaattttgaccatccacttcactgggcactcattcatctatggaaagaggcatgaggacaccttgaccctcttccccatgcgtggagaatctgtgacggtcacaatggataatgttggaacttggatgttaacttccatgaattctagtccaagaagcaaaaagctgaggctgaaattcagggatgttaaatgtatcccagatgatgatgaagactcatatgagatttttgaacctccagaatctacagtcatggctacacggaaaatgcatgatcgtttagaacctgaagatgaagagagtgatgctgactatgattaccagaacagactggctgcagcattaggaatcaggtcattccgaaactcatcattgaatcaggaagaagaagagttcaatcttactgccctagctctggagaatggcactgaattcgtttcttcaaacacagatataattgttggttcaaattattcttccccaagtaatattagtaagttcactgtcaataaccttgcagaacctcagaaagccccttctcaccaacaagccaccacagctggttccccactgagacacctcattggcaagaactcagttctcaattcttccacagcagagcattccagcccatattctgaagaccctatagaggatcctctacagccagatgtcacagggatacgtctactttcacttggtgctggagaattcaaaagtcaagaacatgctaagcataagggacccaaggtagaaagagatcaagcagcaaagcacaggttctcctggatgaaattactagcacataaagttgggagacacctaagccaagacactggttctccttccggaatgaggccctgggaggaccttcctagccaagacactggttctccttccagaatgaggccctggaaggaccctcctagtgatctgttactcttaaaacaaagtaactcatctaagattttggttgggagatggcatttggcttctgagaaaggtagctatgaaataatccaagatactgatgaagacacagctgttaacaattggctgatcagcccccagaatgcctcacgtgcttggggagaaagcacccctcttgccaacaagcctggaaagcagagtggccacccaaagtttcctagagttagacataaatctctacaagtaagacaggatggaggaaagagtagactgaagaaaagccagtttctcattaagacacgaaaaaagaaaaaagagaagcacacacaccatgctcctttatctccgaggacctttcaccctctaagaagtgaagcctacaacacattttcagaaagaagacttaagcattcgttggtgcttcataaatccaatgaaacatctcttcccacagacctcaatcagacattgccctctatggattttggctggatagcctcacttcctgaccataatcagaattcctcaaatgacactggtcaggcaagctgtcctccaggtctttatcagacagtgcccccagaggaacactatcaaacattccccattcaagaccctgatcaaatgcactctacttcagaccccagtcacagatcctcttctccagagctcagtgaaatgcttgagtatgaccgaagtcacaagtccttccccacagatataagtcaaatgtccccttcctcagaacatgaagtctggcagacagtcatctctccagacctcagccaggtgaccctctctccagaactcagccagacaaacctctctccagacctcagccacacgactctctctccagaactcattcagagaaacctttccccagccctcggtcagatgcccatttctccagacctcagccatacaaccctttctccagacctcagccatacaaccctttctttagacctcagccagacaaacctctctccagaactcagtcagacaaacctttctccagccctcggtcagatgcccctttctccagacctcagccatacaaccctttctctagacttcagccagacaaacctctctccagaactcagccatatgactctctctccagaactcagtcagacaaacctttccccagccctcggtcagatgcccatttctccagacctcagccatacaaccctttctctagacttcagccagacaaacctctctccagaactcagtcaaacaaacctttccccagccctcggtcagatgcccctttctccagaccccagccatacaaccctttctctagacctcagccagacaaacctctctccagaactcagtcagacaaacctttccccagacctcagtgagatgcccctctttgcagatctcagtcaaattccccttaccccagacctcgaccagatgacactttctccagaccttggtgagacagatctttccccaaactttggtcagatgtccctttccccagacctcagccaggtgactctctctccagacatcagtgacaccacccttctcccggatctcagccagatatcacctcctccagaccttgatcagatattctacccttctgaatctagtcagtcattgcttcttcaagaatttaatgagtcttttccttatccagaccttggtcagatgccatctccttcatctcctactctcaatgatacttttctatcaaaggaatttaatccactggttatagtgggcctcagtaaagatggtacagattacattgagatcattccaaaggaagaggtccagagcagtgaagatgactatgctgaaattgattatgtgccctatgatgacccctacaaaactgatgttaggacaaacatcaactcctccagagatcctgacaacattgcagcatggtacctccgcagcaacaatggaaacagaagaaattattacattgctgctgaagaaatatcctgggattattcagaatttgtacaaagggaaacagatattgaagactctgatgatattccagaagataccacatataagaaagtagtttttcgaaagtacctcgacagcacttttaccaaacgtgatcctcgaggggagtatgaagagcatctcggaattcttggtcctattatcagagctgaagtggatgatgttatccaagttcgttttaaaaatttagcatccagaccgtattctctacatgcccatggactttcctatgaaaaatcatcagagggaaagacttatgaagatgactctcctgaatggtttaaggaagataatgctgttcagccaaatagcagttatacctacgtatggcatgccactgagcgatcagggccagaaagtcctggctctgcctgtcgggcttgggcctactactcagctgtgaacccagaaaaagatattcactcaggcttgataggtcccctcctaatctgccaaaaaggaatactacataaggacagcaacatgcctatggacatgagagaatttgtcttactatttatgacctttgatgaaaagaagagctggtactatgaaaagaagtcccgaagttcttggagactcacatcctcagaaatgaaaaaatcccatgagtttcacgccattaatgggatgatctacagcttgcctggcctgaaaatgtatgagcaagagtgggtgaggttacacctgctgaacataggcggctcccaagacattcacgtggttcactttcacggccagaccttgctggaaaatggcaataaacagcaccagttaggggtctggccccttctgcctggttcatttaaaactcttgaaatgaaggcatcaaaacctggctggtggctcctaaacacagaggttggagaaaaccagagagcagggatgcaaacgccatttcttatcatggacagagactgtaggatgccaatgggactaagcactggtatcatatctgattcacagatcaaggcttcagagtttctgggttactgggagcccagattagcaagattaaacaatggtggatcttataatgcttggagtgtagaaaaacttgcagcagaatttgcctctaaaccttggatccaggtggacatgcaaaaggaagtcataatcacagggatccagacccaaggtgccaaacactacctgaagtcctgctataccacagagttctatgtagcttacagttccaaccagatcaactggcagatcttcaaagggaacagcacaaggaatgtgatgtattttaatggcaattcagatgcctctacaataaaagagaatcagtttgacccacctattgtggctagatatattaggatctctccaactcgagcctataacagacctacccttcgattggaactgcaaggttgtgaggtaaatggatgttccacacccctgggtatggaaaatggaaagatagaaaacaagcaaatcacagcttcttcgtttaagaaatcttggtggggagattactgggaacccttccgtgcccgtctgaatgcccagggacgtgtgaatgcctggcaagccaaggcaaacaacaataagcagtggctagaaattgatctactcaagatcaagaagataacggcaattataacacagggctgcaagtctctgtcctctgaaatgtatgtaaagagctataccatccactacagtgagcagggagtggaatggaaaccatacaggctgaaatcctccatggtggacaagatttttgaaggaaatactaataccaaaggacatgtgaagaactttttcaaccccccaatcatttccaggtttatccgtgtcattcctaaaacatggaatcaaagtattgcacttcgcctggaactctttggctgtgatatttactagaattgaacattcaaaaacccctggaagagactctttaagacctcaaaccatttagaatgggcaatgtattttacgctgtgttaaatgttaacagttttccactatttctctttcttttctattagtgaataaaattttatacaagaagcttttataatgtaactccttgctaccagtaagtaagataatggctattacttctgcattaatttgaatacaggtaggaaaatatcaagaaccaacaagaaaagggcttatctttcttaatgattgaaaatgctatgaagtaatatttatgtagttaaaatgcttcattataactcttttaaatcctttacacactagtaaaacagatattactttaaataataattgatagacctggataactttcacaaacacatgattttttaatggtttttcttgagtgaagagaaaaacaatattatcaaatgaaataagtacttaaaatatcctgtctttcccatataacaatgatttttctgactttccatgagtaaaaaaacagccaagcatctttccagtagccccattgaaattgtgaatccgtcctggtctccctaaggactgcacacattgatattcaaggttggtggtcattagatatggaacagaactgaaataaccatggtagaactgaatgtgtaatgttggctttattctagctggtactacatggcacacagtttcaaaacataatttcacctactggaaagctcagacctgtaaaacagagcatgggaactgctggtctaaatgcagttgttcctgctcaaagagacctctggccaaactggcaagcagttaaagttttctttcagggccttcctctctatggcctcaacttcctcctctctcttcttccagcaacttcccctttcatcattcctttccctggggacttggcattcagtgatcctgtagatattgcacaactggggaacctttagacatccttaaaatcacatgagatagacagtcatttggggtgtctgaaataaaccaccccaaaacttagtgttaaaagagcaaccaaaaaaaatttatgtgagattatggatttgttacttagcttgatttaatcatcctgtaacgtgtacatatatcaaaatgttatgtataccataaatatataaaattttatcaacgaaattcataacaatctctcagaccacagagaaatcaaattagaactgaggactaagaaactcactcgaaaccacacaactacatggaaactgaacaacctgctcctgaatgactactgggtaaataatgaaattaaggcagaaataaataagttccttaaaaccaatgagaacaaagagacaacataccagaatctctaggagacagggctttgcttttgctgcattctattcgttgtgaacacaaattacaggccagtctcgattcagtgtagaagggaactgcataaggaccacataccaggaggcataattcactgggagcatctttagaaactaccagagttacctgttgcccataccagtggggtaagccctatgaatgtatatgagagtttcaaacatccacaaaacattggctttctaatattcgtattcccactattcctttcttttcatgattcatgtcattgtcccatcaacatttctaagatttccattccgttaagagcaaaagagaatgttggaaggtgggggaaaacatttctttgttttctacagggccagcttcttggatgtgtgtgatctgttcagttgcaaagggtcacatgctcagaaggaccgcatgctaaatttaatgctttgcagttaccctcttgaaatcctttattttttaagaaggaattcgacatttccatttttcaatgagccccacaaattacgcagctagtcctgggcttctctactctgaaattgggcaggatctctcttgatctagaatttactaaggcataataggggcaagaaaatcttatgaaataatggggggtagggaagagatgggaatggagcatgagatccagcttcgttattctctacttgagaaaaataaggccccaaagattaaacaacttgcccaaggatattgcttgttagtgtcagaactgaaaccagaaaccaaatgatcatatccctagacttttagtctgctttctcttccataaaatgaaacttataatgtttctaatccattgctcagacaggtagacatgaatattaattgataatgactattaattgatctggaaaatacttgtttggggatcaataatatgtttgggctattatctaatgctgtgtagaaatattaaaacccctgttattttgaaataaaaaagatacccactttt

SEQ ID NO: 13 - DNA, 1665 bp, Homo sapiens
cttctggtaaggaggccccgtgatcagctccagccatttgcagtcctggctatcccaggagcttacataaagggacaattggagcctgagaggtgacagtgctgacactacaaggctcggagctccgggcactcagacatcatgagttggtccttgcacccccggaatttaattctctacttctatgctcttttatttctctcttcaacatgtgtagcatatgttgctaccagagacaactgctgcatcttagatgaaagattcggtagttattgtccaactacctgtggcattgcagatttcctgtctacttatcaaaccaaagtagacaaggatctacagtctttggaagacatcttacatcaagttgaaaacaaaacatcagaagtcaaacagctgataaaagcaatccaactcacttataatcctgatgaatcatcaaaaccaaatatgatagacgctgctactttgaagtccaggaaaatgttagaagaaattatgaaatatgaagcatcgattttaacacatgactcaagtattcgatatttgcaggaaatatataattcaaataatcaaaagattgttaacctgaaagagaaggtagcccagcttgaagcacagtgccaggaaccttgcaaagacacggtgcaaatccatgatatcactgggaaagattgtcaagacattgccaataagggagctaaacagagcgggctttactttattaaacctctgaaagctaaccagcaattcttagtctactgtgaaatcgatgggtctggaaatggatggactgtgtttcagaagagacttgatggcagtgtagatttcaagaaaaactggattcaatataaagaaggatttggacatctgtctcctactggcacaacagaattttggctgggaaatgagaagattcatttgataagcacacagtctgccatcccatatgcattaagagtggaactggaagactggaatggcagaaccagtactgcagactatgccatgttcaaggtgggacctgaagctgacaagtaccgcctaacatatgcctacttcgctggtggggatgctggagatgcctttgatggctttgattttggcgatgatcctagtgacaagtttttcacatcccataatggcatgcagttcagtacctgggacaatgacaatgataagtttgaaggcaactgtgctgaacaggatggatctggttggtggatgaacaagtgtcacgctggccatctcaatggagtttattaccaaggtggcacttactcaaaagcatctactcctaatggttatgataatggcattatttgggccacttggaaaacccggtggtattccatgaagaaaaccactatgaagataatcccattcaacagactcacaattggagaaggacagcaacaccacctggggggagccaaacaggctggagacgtttaaaagaccgtttcaaaagagatttacttttttaaaggactttatctgaacagagagatataatatttttcctattggacaatggacttgcaaagcttcacttcattttaagagcaaaagaccccatgttgaaaactccataacagttttatgctgatgataatttatctacatgcatttcaataaaccttttgtttcctaagactagaaaaa

SEQ ID NO: 14 - DNA, 2071 bp, Homo sapiens
agcggtctcccgcccgcggcgccatcgcgccattcctagttaaggcggcacagggccgaggcgtagtgtgggtgactcctccgttccttgggtcccgtcgtctgtgatactgcagcgcagccatggcagaaccgcagcccccgtccggcggcctcacggacgaggccgccctcagttgctgctccgacgcggaccccagtaccaaggattttctattgcagcagaccatgctacgagtgaaggatcctaagaagtcactggatttttatactagagttcttggaatgacgctaatccaaaaatgtgattttcccattatgaagttttcactctacttcttggcttatgaggataaaaatgacatccctaaagaaaaagatgaaaaaatagcctgggcgctctccagaaaagctacacttgagctgacacacaattggggcactgaagatgatgagacccagagttaccacaatggcaattcagaccctcgaggattcggtcatattggaattgctgttcctgatgtatacagtgcttgtaaaaggtttgaagaactgggagtcaaatttgtgaagaaacctgatgatggtaaaatgaaaggcctggcatttattcaagatcctgatggctactggattgaaattttgaatcctaacaaaatggcaaccttaatgtagtgctgtgagaattctcctttgagatttcagaagaaaggaaacaatgtgattcaagatatttacataccagaagcatctaggactgatggatcactgtcccgattcaaattattcttcagtccatttccccttcctatttcagctgttccttttcacctaactgttcagtcattctggttttcaagcagtgctttatctcatgtccttgaatatagttgtgtaactttattttttaggtaataattagaacagttcccttcagaggctgcatttgccttcttctgccacctaaatattacttcccttcaaatctgcctttgaatcatcatttttaaaaaaaaattaacatgtttttgttgtagttatcttctggggtttcaattcctcagaaacaacttttttcacaacggaaaggaaagaacactagtgttctttcagtaaagtacaaagtgtttattttacaaaagagtaggtactcttgagagcaattcaaatcatgctgacaaggatactgatagaaaaagtgatttcttcttattataaagtacatttaaagttcaaggactaaccttatttatttgggaaaggggaggaggaaggaaatgatatggtacccagacactgggctaggctgcaactttatctcatttaatactcccagctgtcatgtgagaaagaaagcaggctaggcatgtgaaatcactttcatggattattaatggatttaagagggcatcaatcagctcaactcaagatttcataatcatttttagtatttagattgtgcctcaaagttgtagtacctcacaatacctccactggtttcctgttgtaaaaaccttcagtgagtttgaccattgtgctcttggctcttgggctggagtaccgtggtgagggagtaaacactagaagtctttagtacaaaactgctctagggacacctggtgattcctacacaagtgatgtttatatttctcataaagagtcttccctatcccaaggtcttcatgatgccagtagccatatatgataaattatgttcagtgataacttagttatcagaaatcagctcagtggtcttccccgccatgattcacatttgatgagtttttaaaaatcaaagtgattttgaaaatctctaatggctcagaaaataaaaacatccagtttgtggatgactatatttagatttctctagactctagtggaagacctttggaaaggccatgccaaccgtgcttgtactgctagaagcactttatgtttcctttttgggtgaaatggatttatgtgagtgctttaaacaaatagcaatacttatagactgaaataaaatgaaacttcaaataagactatgtttaatttgtaaaaaaaaaaaaaaaaaaaaaaaaaaa

SEQ ID NO: 15 - DNA, 4337 bp, Homo sapiens
cgtcatgttagggtgaagcagaggacctcagtgctgaacatgctaaggaggttggacaaaatcaggttcagaggtcacaagagagatgacttcctcgatctagcggagtctccaaatgcctcggacaccgaatgcagcgacgaaatccccctgaaggtaccgcggacctcgccccgggacagcgaggagctgagggaccctgctggtccagggaccctcatcatggccacaggagtccaggactttaaccggacagagtttgatcgactgaatgagatcaaaggtcacctggaaattgccttattggaaaaacatttcttacaggaggagctccggaagctgcgagaagaaaccaacgcggagatgctgcggcaggagctggaccgcgagcggcagcggcggatggagctggagcagaaggtgcaggaggtgctgaaggccagaaccgaggagcagatggctcagcagcccccaaaagggcaggcccaggccagcaatggagcagagcgccggagccaggggctgtcctcgcgcctgcagaagtggttctacgagcggttcggggagtacgtggaggacttccggttccagcccgaggagaacactgtggagacagaggaacccctgagcgcccgcaggttaactgaaaatatgagacggctcaagcgcggtgccaagccggtcactaactttgtgaagaacctctctgccttatccgactggtactccgtctacacgtctgccattgccttcaccgtgtacatgaatgccgtgtggcatggctgggccatcccattgttcttatttctagcaattctgaggttatccctcaattacctcatcgccagggggtggcggatacagtggagcatcgtgcccgaagtgtctgagcccgtggaacctccaaaggaagacctgactgtgtctgagaagttccagctggtgctggacgtcgcccagaaagcccagaaccttttcgggaagatggctgacatcctggagaagatcaagaacttgttcatgtgggtccagccggagatcacacagaagctgtatgtggcgctctgggctgccttcctggcctcctgcttcttcccctaccgcctggtggggcttgccgtgggactctatgctggtatcaagttcttcctcattgatttcatctttaaacgctgcccgaggctgcgcgccaagtacgacacgccctatatcatctggaggagtctccccaccgacccgcagctcaaggagcgctccagcgccgcagtctcacgcaggctgcagacgacctcgtcacggagctacgtacccagcgcaccggccggcctgggtaaagaggaggacgccggtcgcttccacagcaccaagaagggcaatttccacgagatcttcaatctgacagaaaacgagcgtccgctggcggtgtgcgagaatggctggcgctgctgcctcatcaacagggaccggaagatgcccacggactacatcaggaacggggtgctctacgtcacggagaattacttgtgcttcgaaagctccaaatctgggtcctcaaagaggaacaaagtcatcaagctagtggacatcacggacatccagaagtacaaggtcctgtctgtcctcccaggctcaggcatggggattgccgtgtcgacgccatccacccagaaaccgctcgtgtttggtgccatggtgcacagggatgaggccttcgagaccattctcagccagtacatcaagatcacctcagcggcagcgtctggcggggacagctagtattgacttgcccaggacgttgctggaattttctttttctttttctttttctttttttttttttacgatttggtagtggaaacaattggacatcctcatgagcttttgcaataattctcctggacctgtggttctattgtgttgacctctgcgttttatcgaccaagaaggggccagggctcacagggacgggggtgcccctctcccacagggcacgtcaggtgcctctgagggccacccgcagactgggggagggggcagaggccctcgggggcccgtggagaagacacacaggacccctggccctgcccttctccgttccagcctggacagagaaacctctccagccaccccaagaggttctcgcaaccttgtgtcccgctctccagaggccagaagctcgtccaccaccaaagccatagctgaagagtgcggggcccttcctcctggggacagaaagatgtcgtcaaggagggacatgggggcctttcaccaaccaccgagaaacgggcctggcggccctccttcctcttacatgagaccctcctgtggcatttgcccttggtgccgggctggggccgggcgcagtgaccctgcctgcgctccacactcgctccacgggaacagagagggtgagaagggcccacccctcgcctgccctcagtgtctttggtggcaccttccttgctggcctccagggcgctcagcaccgcgtctgtaagggcctgcctgctgctctcggcctgacacgccggccaggaggtctgtagctggggaccagtaagggcacaggatggtgcaggtaaaagcacatctttctcacactttgctctttggaaggcccaggagaacatccgcgaaggctgttggaggtgctccgagcactgtggcatgtctggcacatggcccccaggctgcggttgcctgggttggttgggggaggaagtggggaggagtgttccgggaccatggtggcccaggctgcagccgcctttgggccatccgagaggctctggcagcccctgtgctttagggagcaaccgtgagccgagcccagaggcctgggcctgcactgcctgcagccgacatgcgacagcgttccctcccccgcgtgcctagccggtgccggtccgggcacagacccccccagcccccgccctgccccagggaagcctgggcttcccgggaacaaggtggcatttgtggagggagcgcccgcaggcctggtctgctggggccgcctgcgctgggctgaagggagggaaaggcggcttgggcctcctggaaggaggtggccaccccgcgggcctgcgtgtctgctggggcggatcccgcagctccctcagcttgtcctgagtcccttgggtgtcgttgagattgttgttttttgaagaaacagaagattctattttttacagcgagcaagctggttttcttatttttgtatcctttttcagatgtaatttttatctttgctccgatcctcatttgctggtgtgggtgagggatccggcggcatgggctggtttcacccccttcacgaggggccgcagagtcacacgctggtgccgggggtgctttggggggagctgcgccgatcaccagattaagcacatgtcctatcccaggcggtggagcggagcccccgtggctctggactgcgcggacgttggcgtcaggatgaccacacggcggcctttcccgaatggggacagaacccgctctgagccgtgggtctggctcctgtaggggactggctctcttggtgcaccaggggagggggacatatcccagtgaaccccaccttggcgcctgaggcaacacagggtgggcactgacccacccccaggggcggctgcagaggcagtgcccgcagacaatggccacacctctctccccagggcccggcagtgcccaaggatgggtccggggcctcggggccaatgagcgcctcttcctaggtgctgggattcagtccccaaacacagcgggaggggtccctggggcagatggggctttaccagcgtcgggtggtttagttcgagtcccttttgtggagaaagggagatgaaaactgaccacgtgccaggtgtggccgaagcccccagggagggccacattcggggagcggggggtcgggggagggccaccgactggctctgctgccagcacaggcccctccctggaagtcctcgggagcggagcgcggatcggcacgggctctgggctccccgtggagagaagctgtagtttttaccaaattgtgtacatctgggcagatgtttaatttctgtgactaatcactgaactagacgaatgttaaattttttatgtctgaagcctgagtctattttggatctgtaaataatcattgccagtgtgacttttgttcaacaaaaggattgtactgtattaagaaccgatgaaaaaaattctcctgtaacatttttttaagaaaactttgtttgtttaaagaaaaagtattgtataaattataatttttatttaaataaacctaaaatgctttgtgctaaggctcaaaaaaaaaaaaaaaaaaaaaa

SEQ ID NO: 16 - DNA, 7771 bp, Homo sapiens
cagagaggaagtagcgagagaagagagaaaatgaagtcggcgctgggggagcctgcaggagggtggccaacagtggaggaaggtggatttggcttcttttccgcaccccgggcgtgaaagccctctccaacgcgaccccaggaaataagtgggtctcgcctgggcagaaaaggaaaagaatccaggcgagagcgcgtcgctcctctgtcactgctgcccccgaggaactccggctgcttctcatcccggccgcctcgcggggccggacgcagtgcccgaggcgccctgcagatggggcgggcagggaacgggcgctccagctgcgggtgacaggcgccggcccgcccgcctgcctgctcagcgcagtgaccgggcgggcagaggatgccaggcggagggacctgggagcgggatctgagactgccggaggcgcgctacgctccaacttgcatggcctagagaccgctccagctcctgggaccgcttcaccgagtggagtgaagctgcgcgcgggacctggaggcggagacctcaggcagcggctgcagaggggcgagccgggcgcaggagggggcgcgctttctccctgcgggtctcagtaatgaggagactgagtttgtggtggctgctgagcagggtctgtctgctgttgccgccgccctgcgcactggtgctggccggggtgcccagctcctcctcgcacccgcagccctgccagatcctcaagcgcatcgggcacgcggtgagggtgggcgcggtgcacttgcagccctggaccaccgccccccgcgcggccagccgcgctccggacgacagccgagcaggagcccagagggatgagccggagccagggactaggcggtccccggcgccctcgccgggcgcacgctggttggggagcaccctgcatggccgggggccgccgggctcccgtaagcccggggagggcgccagggcggaggccctgtggccacgggacgccctcctatttgccgtggacaacctgaaccgcgtggaagggctgctaccctacaacctgtctttggaagtagtgatggccatcgaggcaggcctgggcgatctgccacttttgcccttctcctcccctagttcgccatggagcagtgaccctttctccttcctgcaaagtgtgtgccataccgtggtggtgcaaggggtgtcggcgctgctcgccttcccccagagccagggcgaaatgatggagctcgacttggtcagcttagtcctgcacattccagtgatcagcatcgtgcgccacgagtttccacgggagagtcagaatccccttcacctacaactgagtttagaaaattcattaagttctgatgctgatgtcactgtctcaatcctgaccatgaacaactggtacaattttagcttgttgctgtgccaggaagactggaacatcaccgacttcctcctccttacccagaataattccaagttccaccttggttctatcatcaacatcaccgctaacctcccctccacccaggacctcttgagcttcctacagatccagcttgagagtattaagaacagcacacccacagtggtgatgtttggctgcgacatggaaagtatccggcggattttcgaaattacaacccagtttggggtcatgccccctgaacttcgttgggtgctgggagattcccagaatgtggaggaactgaggacagagggtctgcccttagggctcattgctcatggaaaaacaacacagtctgtctttgagcactacgtacaagatgctatggagctggtcgcaagagctgtagccacagccaccatgatccaaccagaacttgctctcattcccagcacgatgaactgcatggaggtggaaactacaaatctcacttcaggacaatatttatcaaggtttctagccaataccactttcagaggcctcagtggttccatcagagtaaaaggttccaccatcgtcagctcagaaaacaactttttcatctggaatcttcaacatgaccccatgggaaagccaatgtggacccgcttgggcagctggcaggggggaaagattgtcatggactatggaatatggccagagcaggcccagagacacaaaacccacttccaacatccaagtaagctacacttgagagtggttaccctgattgagcatccttttgtcttcacaagggaggtagatgatgaaggcttgtgccctgctggccaactctgtctagaccccatgactaatgactcttccacattggacagcctttttagcagcctccatagcagtaatgatacagtgcccattaaattcaagaagtgctgctatggatattgcattgatctgctggaaaagatagcagaagacatgaactttgacttcgacctctatattgtaggggatggaaagtatggagcatggaaaaatgggcactggactgggctagtgggtgatctcctgagagggactgcccacatggcagtcacttcctttagcatcaatactgcacggagccaggtgatagatttcaccagccctttcttctccaccagcttgggcatcttagtgaggacccgagatacagcagctcccattggagccttcatgtggccactccactggacaatgtggctggggatttttgtggctctgcacatcactgccgtcttcctcactctgtatgaatggaagagtccatttggtttgactcccaaggggcgaaatagaagtaaagtcttctccttttcttcagccttgaacatctgttatgccctcttgtttggcagaacagtggccatcaaacctccaaaatgttggactggaaggtttctaatgaacctttgggccattttctgtatgttttgcctttccacatacacggcaaacttggctgctgtcatggtaggtgagaagatctatgaagagctttctggaatacatgaccccaagttacatcatccttcccaaggattccgctttggaactgtccgagaaagcagtgctgaagattatgtgagacaaagtttcccagagatgcatgaatatatgagaaggtacaatgttccagccacccctgatggagtggagtatctgaagaatgatccagagaaactagacgccttcatcatggacaaagcccttctggattatgaagtgtcaatagatgctgactgcaaacttctcactgtggggaagccatttgccatagaaggatacggcattggcctcccacccaactctccattgaccgccaacatatccgagctaatcagtcaatacaagtcacatgggtttatggatatgctccatgacaagtggtacagggtggttccctgtggcaagagaagttttgctgtcacggagactttgcaaatgggcatcaaacacttctctgggctctttgtgctgctgtgcattggatttggtctgtccattttgaccaccattggtgagcacatagtatacaggctgctgctaccacgaatcaaaaacaaatccaagctgcaatactggctccacaccagccagagattacacagagcaataaatacatcatttatagaggaaaagcagcagcatttcaagaccaaacgtgtggaaaagaggtctaatgtgggaccccgtcagcttaccgtatggaatacttccaatctgagtcatgacaaccgacggaaatacatctttagtgatgaggaaggacaaaaccagctgggcatccggatccaccaggacatccccctccctccaaggagaagagagctccctgccttgcggaccaccaatgggaaagcagactccctaaatgtatctcggaactcagtgatgcaggaactctcagagctcgagaagcagattcaggtgatccgtcaggagctgcagctggctgtgagcaggaaaacggagctggaggagtatcaaaggacaagtcggacttgtgagtcctaggtgaccacactgcttccctttctcagttcctgaccttcctctgagcccttgagacactttgtaatgctcttttgtaactatcgacaaaggtgtggggaagctgaggtctaggtcttcttaaaggtcaagtctgctctccctcgcctaaagtgcagcagcagctcctctcaagctcactctctaggtctccagggtaggagtgtttttctagcaagaatcttagtcaggagtaagctctgtgcgagagatctgtgaataaccagataaccccagctgccgttaaccttttcaccaggtgccacagtaatatttctggtttttagccctttctctgcactaccaacaagagataaaattgttactcacacttatgtcttactgggttgctggttttcatcgtaacacagaacgaggttatctagggttgtagcttttgatacaactccccgatctagatttattcctacattctgaatggggagcaggtaagagcagagcacctcccactgggggtggggtatttaaaaattaactcattagtatcataaacgtcaaggattgattggaccaggcaagagccatgtttttgagaaggttctggatctctgactccatcctgactgtttagtaagagcatgcttacaccctactgtgaaaaggggaggggatgtggtaagcggaaacagaagacaggcagcagaggcattaaaaatgcataccatgctttcagaacaaaagctctgggccagaaaggcaatttggctaaaaaatgaataagactacttctaatgtaactaagcatctccactatggtgtgtgccttttataaaggaaaagagagaaaaaggcaaagcaaggttgtggccttaggttggacctggaatatcccttattgcctataatggaatatgtgacactgtgggtgaaatgttctacacaccacacactaggccattttcagatcagcagtcacccatcgcttagcatagaaatcccaaaacctccagcccgggaacactataagcttcgaccattcaggaatctgccctgcactttgcatatctgtatagaaaatcaagtcaatcccccatcctcacacccactcatctctgaggagctatgaactggttttggtccctctaatgatcctccagcctcatctaatgccccccaaagactgatacaagtaacctcccctctgcttaggtgtcactttctcagcatatcaagtttaggcagcaagggaaaggaatatgggtcagttctcaaatgtcaatgtagataagagtcatctagtagagaactcatcagagtgcggattgccaagacccttctccagagattatggggttgggggtggaggtctagaggtgagctcagaaacctactgttaaccaacacccccaagtgactgacacaggtggtctaaaaattacttttctagaaacaccattctggaagtttggctgcccacaggcaggaggagaagcatgaagagaaaacctgtttgagaagttttgttttgttttgttttgctttttaataattttagcacacatctgctgactctccttcaacatcctcacccccacccctgggcaccatttaggacaagacttccttatttatcaattacttgatttatcttctcaggactcattgttccacccccaaccaatttgaatgcctacaataagttcaggagctgtgccaagcactttcctcttttacagctggagatcactggaaaggtgtctcagtcacaaaacttctccctctactactggatgaaatgtctgcatttccaccaaaatctacccagtcacccagggaataacaacttaagctgtagttagataacacctagtgattaattggctgagaaaaccctggagtggagggaggctcagagatactgatatggatgtgggagggctctaaagttagaggtcaccaactccacagatgaaacagttcaataatgaggaaacaggtgagccctgaaaacacaaaaggacagttctgtgttgaaacaccccatcccctcacgttctcaccccaggcccagaagtaggttgcaactgcctttggaagattttgccccttagccatccccacccacttgtaccagctaagaatgctggagactctgccaccatgctctgcgtgcccctgaacctctgtgcagcccggaaggctgatgtacaggtgtacctcaatccacattacagccatgctcctaatgtacatggacatttttgtaactcagctcatattctgactgtatttgagaagctggctgtttaagggaacccagaagtgaattcttttgtaaagtaaagcacccttttgtaatgcaattaattatcccttaatgtatctgttttgtaagtctgcatttttgtatatcggatttaccttaagcttctctagtgaggcattctgagcagtggtgatcacatgccagatcgccctgcctatccacaaagtagatgaccaatgcacgctcctcaaacatctttggaggaactacctggccaaaacactggccaggatgcagcaagcagcagcaggggctgacagcaggcttactgccatcaacattgcttgaaatgcctctatgttctgaataaagaaaaaccataattgcttgtggtgaaacgaagcagtcttcatgttaagtagcaatggttatttttattggtagtaactgaacagtgttttgcaatttgtgaaacagtgtattgtgttttgtaaaatgatgtcatgaaatggtgggtccttggaaacctcctttccgttcagctctgcctctgttctttcaactcctttgaggctcaaaaaaaacacaaagatcagaagccttcagatagagggtggtattctggtaaagaagaaagagataagggacgctaccttgcttttctggcacaggaagcacatgataaagcatgctcagatgagctggaacagatatagctacctggttcgtgtaaataagaataatcaaggccccagagtgtgtatgcttccaggtggaggagaaaggggaatctcccaaaatttaaaaacaaattggaagaataaccaggacagccaagtgaagcagccacagggacccaagcagtcgaggtctttaatgtgcctggagatgactctctgctattcatgaatcttgctattgcacaaaccctatcaagagctgctgcttcccttccagccagaaaagtggtaagcggagcaagtgccaagcagaacagaccttatcatctgggtaacagacttctcagtgttggtgctgtgtctgttagagccttagagcaagttaagcacttccttggtgtgggtaaagaataaaggggaaagaaactactttagagcctctttttctcccaactcatatttttgataggaaaaacagaaaacccatccagttcttcagaaattgctttctaggcattaatactactttactatctatactgtttagttattcctttctttacccacctaaactatccatctaatccaggattccctcactctttttttttagttactaatcattttatgaaaataatgtatttataagtattttcttaaggtttgtgaagagtatttgcattgtgtcttcattttaatgtgtttgcaatcgctccgctccaggaagaacggaaatgctgtcttgtgagcatgaagtgaacgggctgttttgctccagccacttttcttgtacaaccacatggatggattagatgtcctcaggtcttttccatcttcagtttctatgactgtggaataaatgttcagatagaaacttca

SEQ ID NO: 17 - DNA, 4082 bp, Homo sapiens
gcgcgcgccggcctgggcaggcgagcgggcgcgctcccgccccctctcccctccccgcgcgcccgagcgcgcctccgcccttgcccgccccctgacgctgcctcagctcctcagtgcacagtgctgcctcgtctgaggggacaggaggatcaccctcttcgtcgcttcggccagtgtgtcgggctgggccctgacaagccacctgaggagaggctcggagccgggcccggaccccggcgattgccgcccgcttctctctagtctcacgaggggtttcccgcctcgcacccccacctctggacttgcctttccttctcttctccgcgtgtggagggagccagcgcttaggccggagcgagcctgggggccgcccgccgtgaagacatcgcggggaccgattcaccatggagggcgccggcggcgcgaacgacaagaaaaagataagttctgaacgtcgaaaagaaaagtctcgagatgcagccagatctcggcgaagtaaagaatctgaagttttttatgagcttgctcatcagttgccacttccacataatgtgagttcgcatcttgataaggcctctgtgatgaggcttaccatcagctatttgcgtgtgaggaaacttctggatgctggtgatttggatattgaagatgacatgaaagcacagatgaattgcttttatttgaaagccttggatggttttgttatggttctcacagatgatggtgacatgatttacatttctgataatgtgaacaaatacatgggattaactcagtttgaactaactggacacagtgtgtttgattttactcatccatgtgaccatgaggaaatgagagaaatgcttacacacagaaatggccttgtgaaaaagggtaaagaacaaaacacacagcgaagcttttttctcagaatgaagtgtaccctaactagccgaggaagaactatgaacataaagtctgcaacatggaaggtattgcactgcacaggccacattcacgtatatgataccaacagtaaccaacctcagtgtgggtataagaaaccacctatgacctgcttggtgctgatttgtgaacccattcctcacccatcaaatattgaaattcctttagatagcaagactttcctcagtcgacacagcctggatatgaaattttcttattgtgatgaaagaattaccgaattgatgggatatgagccagaagaacttttaggccgctcaatttatgaatattatcatgctttggactctgatcatctgaccaaaactcatcatgatatgtttactaaaggacaagtcaccacaggacagtacaggatgcttgccaaaagaggtggatatgtctgggttgaaactcaagcaactgtcatatataacaccaagaattctcaaccacagtgcattgtatgtgtgaattacgttgtgagtggtattattcagcacgacttgattttctcccttcaacaaacagaatgtgtccttaaaccggttgaatcttcagatatgaaaatgactcagctattcaccaaagttgaatcagaagatacaagtagcctctttgacaaacttaagaaggaacctgatgctttaactttgctggccccagccgctggagacacaatcatatctttagattttggcagcaacgacacagaaactgatgaccagcaacttgaggaagtaccattatataatgatgtaatgctcccctcacccaacgaaaaattacagaatataaatttggcaatgtctccattacccaccgctgaaacgccaaagccacttcgaagtagtgctgaccctgcactcaatcaagaagttgcattaaaattagaaccaaatccagagtcactggaactttcttttaccatgccccagattcaggatcagacacctagtccttccgatggaagcactagacaaagttcacctgagcctaatagtcccagtgaatattgtttttatgtggatagtgatatggtcaatgaattcaagttggaattggtagaaaaactttttgctgaagacacagaagcaaagaacccattttctactcaggacacagatttagacttggagatgttagctccctatatcccaatggatgatgacttccagttacgttccttcgatcagttgtcaccattagaaagcagttccgcaagccctgaaagcgcaagtcctcaaagcacagttacagtattccagcagactcaaatacaagaacctactgctaatgccaccactaccactgccaccactgatgaattaaaaacagtgacaaaagaccgtatggaagacattaaaatattgattgcatctccatctcctacccacatacataaagaaactactagtgccacatcatcaccatatagagatactcaaagtcggacagcctcaccaaacagagcaggaaaaggagtcatagaacagacagaaaaatctcatccaagaagccctaacgtgttatctgtcgctttgagtcaaagaactacagttcctgaggaagaactaaatccaaagatactagctttgcagaatgctcagagaaagcgaaaaatggaacatgatggttcactttttcaagcagtaggaattggaacattattacagcagccagacgatcatgcagctactacatcactttcttggaaacgtgtaaaaggatgcaaatctagtgaacagaatggaatggagcaaaagacaattattttaataccctctgatttagcatgtagactgctggggcaatcaatggatgaaagtggattaccacagctgaccagttatgattgtgaagttaatgctcctatacaaggcagcagaaacctactgcagggtgaagaattactcagagctttggatcaagttaactgagctttttcttaatttcattcctttttttggacactggtggctcattacctaaagcagtctatttatattttctacatctaattttagaagcctggctacaatactgcacaaacttggttagttcaattttgatcccctttctacttaatttacattaatgctcttttttagtatgttctttaatgctggatcacagacagctcattttctcagttttttggtatttaaaccattgcattgcagtagcatcattttaaaaaatgcacctttttatttatttatttttggctagggagtttatccctttttcgaattatttttaagaagatgccaatataatttttgtaagaaggcagtaacctttcatcatgatcataggcagttgaaaaatttttacaccttttttttcacattttacataaataataatgctttgccagcagtacgtggtagccacaattgcacaatatattttcttaaaaaataccagcagttactcatggaatatattctgcgtttataaaactagtttttaagaagaaattttttttggcctatgaaattgttaaacctggaacatgacattgttaatcatataataatgattcttaaatgctgtatggtttattatttaaatgggtaaagccatttacataatatagaaagatatgcatatatctagaaggtatgtggcatttatttggataaaattctcaattcagagaaatcatctgatgtttctatagtcactttgccagctcaaaagaaaacaataccctatgtagttgtggaagtttatgctaatattgtgtaactgatattaaacctaaatgttctgcctaccctgttggtataaagatattttgagcagactgtaaacaagaaaaaaaaaatcatgcattcttagcaaaattgcctagtatgttaatttgctcaaaatacaatgtttgattttatgcactttgtcgctattaacatcctttttttcatgtagatttcaataattgagtaattttagaagcattattttaggaatatatagttgtcacagtaaatatcttgttttttctatgtacattgtacaaatttttcattccttttgctctttgtggttggatctaacactaactgtattgttttgttacatcaaataaacatcttctgtggaccaggcaaaaaaaaaaaaaaaaaaaaaaa

SEQ ID NO: 18 - DNA, 15164 bp, Homo sapiens
cgctccgcccgcccggccgccccgagccccgagccccgagccccccgcgccgggcccgggcggcagcggcggcggcggcggcggcggcgcgcccggccccctcccccggcgccggccacgggaggcggtgatgcgggcgcgggcggcctcggctgcgccgagagcggagacacaggctcaagatggcagattccgactgaggctgggggggccgagctcgcgcgccgctttcccgtccccgttgccatgaaccgcggacaccccggccccgatggcccccgtgtacgaaggtatggcctcacatgtgcaagttttctcccctcacacccttcaatcaagtgccttctgtagtgtgaagaaactgaaaatagagccgagttccaactgggacatgactgggtacggctcccacagcaaagtgtatagccagagcaagaacatccccctgtcgcagccagccaccacaaccgtcagcacctccttgccggtcccaaacccaagcctaccttacgagcagaccatcgtcttcccaggaagcaccgggcacatcgtggtcacctcagcaagcagcacttctgtcaccgggcaagtcctcggcggaccacacaacctaatgcgtcgaagcactgtgagcctccttgatacctaccaaaaatgtggactcaagcgtaagagcgaggagatcgagaacacaagcagcgtgcagatcatcgaggagcatccacccatgattcagaataatgcaagcggggccactgtcgccactgccaccacgtctactgccacctccaaaaacagcggctccaacagcgagggcgactatcagctggtgcagcatgaggtgctgtgctccatgaccaacacctacgaggtcttagagttcttgggccgagggacgtttgggcaagtggtcaagtgctggaaacggggcaccaatgagatcgtagccatcaagatcctgaagaaccacccatcctatgcccgacaaggtcagattgaagtgagcatcctggcccggttgagcacggagagtgccgatgactataacttcgtccgggcctacgaatgcttccagcacaagaaccacacgtgcttggtcttcgagatgttggagcagaacctctatgactttctgaagcaaaacaagtttagccccttgcccctcaaatacattcgcccagttctccagcaggtagccacagccctgatgaaactcaaaagcctaggtcttatccacgctgacctcaaaccagaaaacatcatgctggtggatccatctagacaaccatacagagtcaaggtcatcgactttggttcagccagccacgtctccaaggctgtgtgctccacctacttgcagtccagatattacagggcccctgagatcatccttggtttaccattttgtgaggcaattgacatgtggtccctgggctgtgttattgcagaattgttcctgggttggccgttatatccaggagcttcggagtatgatcagattcggtatatttcacaaacacagggtttgcctgctgaatatttattaagcgccgggacaaagacaactaggtttttcaaccgtgacacggactcaccatatcctttgtggagactgaagacaccagatgaccatgaagcagagacagggattaagtcaaaagaagcaagaaagtacattttcaactgtttagatgatatggcccaggtgaacatgacgacagatttggaagggagcgacatgttggtagaaaaggctgaccggcgggagttcattgacctgttgaagaagatgctgaccattgatgctgacaagagaatcactccaatcgaaaccctgaaccatccctttgtcaccatgacacacttactcgattttccccacagcacacacgtcaaatcatgtttccagaacatggagatctgcaagcgtcgggtgaatatgtatgacacggtgaaccagagcaaaacccctttcatcacgcacgtggcccccagcacgtccaccaacctgaccatgacctttaacaaccagctgaccactgtccacaaccagccctcagcggcatccatggctgcagtggcccagcggagcatgcccctgcagacaggaacagcccagatttgtgcccggcctgacccgttccagcaagctctcatcgtgtgtccccccggcttccaaggcttgcaggcctctccctctaagcacgctggctactcggtgcgaatggaaaatgcagttcccatcgtcactcaagccccaggagctcagcctcttcagatccaaccaggtctgcttgcccagcaggcttggccaagtgggacccagcagatcctgcttcccccagcatggcagcaactgactggagtggccacccacacatcagtgcagcatgccaccgtgattcccgagaccatggcaggcacccagcagctggcggactggagaaatacgcatgctcacggaagccattataatcccatcatgcagcagcctgcactattgaccggtcatgtgacccttccagcagcacagcccttaaatgtgggtgtggcccacgtgatgcggcagcagccaaccagcaccacctcctcccggaagagtaagcagcaccagtcatctgtgagaaatgtctccacctgtgaggtgtcctcctctcaggccatcagctccccacagcgatccaagcgtgtcaaggagaacacacctccccgctgtgccatggtgcacagtagcccggcctgcagcacctcggtcacctgtgggtggggcgacgtggcctccagcaccacccgggaacggcagcggcagacaattgtcattcccgacactcccagccccacggtcagcgtcatcaccatcagcagtgacacggacgaggaggaggaacagaaacacgcccccaccagcactgtctccaagcaaagaaaaaacgtcatcagctgtgtcacagtccacgactccccctactccgactcctccagcaacaccagcccctactccgtgcagcagcgtgctgggcacaacaatgccaatgcctttgacaccaaggggagcctggagaatcactgcacggggaacccccgaaccatcatcgtgccacccctgaaaacccaggccagcgaagtattggtggagtgtgatagcctggtgccagtcaacaccagtcaccactcgtcctcctacaagtccaagtcctccagcaacgtgacctccaccagcggtcactcttcagggagctcatctggagccatcacctaccggcagcagcggccgggcccccacttccagcagcagcagccactcaatctcagccaggctcagcagcacatcaccacggaccgcactgggagccaccgaaggcagcaggcctacatcactcccaccatggcccaggctccgtactccttcccgcacaacagccccagccacggcactgtgcacccgcatctggctgcagccgctgccgctgcccacctccccacccagccccacctctacacctacactgcgccggcggccctgggctccaccggcaccgtggcccacctggtggcctcgcaaggctctgcgcgccacaccgtgcagcacactgcctacccagccagcatcgtccaccaggtccccgtgagcatgggcccccgggtcctgccctcgcccaccatccacccgagtcagtatccagcccaatttgcccaccagacctacatcagcgcctcgccagcctccaccgtctacactggatacccactgagccccgccaaggtcaaccagtacccttacatataaacactggaggggagggagggagggagggagggagagaatggcccgagggaggagggagagaaggagggaggcgctcctgggaccgtgggcgctggccttttatactgaagatgccgcacacaaacaatgcaaacggggcaggggcgggggggggggggggggcagagggcagggggacgggtcgggacaccagtgaaacttgaaccgggaagtgggaggacgtagagcagagaagagaacatttttaaaaggaagggattaaagagggtgggaaatctatggtttttattttaaaaaagaaaaaggaaaaaaaaaaagtcaataacaaaaaacccagctcaagaacccattctacgccaaactggaaaggagaagagagcaacaggaagattccagaaacggggggccccagtttttgaagaactttatgaacttttcaaagattattttcatatggcagcaagtgatacggaagactgctgtcagggacacctgatatggaaatcaaatagatttttaattaattgaacataagatttagggatttttccagaactcgaaagggtcaacagccctccagaatgtcgggctgcagcctgaggaggctgatgtttggagctggtgtgggattggcgaagcccagtccgggctccctagtcaggaaagacgggggacggccaggctgctggaaggcccccgggggcgcggggcgagttttctttttctgagcactctggataaatccctaagcaacgttgtttctcaaatgtcattaataatgtgtgttgcaaactttaggtttttttcttttctgaaaatgtattttctctttgaatccacccctagtcgcgtagcgtagggctagcggtcgtcacagacaccctagtagaatgtagcactcagcacccttgtctcctaccttgtgttcaactccaatgataccaatagaatattcctcaatgtaattgcacaaaaaaaagcgatataacataggcatgtaaccaatgtggcggtgcaggtgtgcgggtgagcgagcacgtgtgggtgtgcacgcgccgccctccccgcgtggccctcggcgccgccaccctagctggcgcagtcttgacactgcatccttccctcctagtgccttaccgagcgacagacgcggcgtgagggtttacttccactggtactccaagaaactgaggctagtcagacacaatctcagctcttctgttgtgctgttgtaacagtttacgctggccttttttttttctttttctttttctttttaaaatgttaatgcccgttgtctttcctgggctgtttgctagcggaaggatgccagggaagccagcaggagctaggagagagtccgtggatctcgaaagaaatatgggagacagatgcccggcgggtgcgtctggagatggggacggcgggagttgagttgtggcagtagttgagttgtaatttgtgggcggaggcccagagagactccccacccttcacccctgccccactctgtccccagttccgccatttgtgaggccagaggtttccggactgttggcctcgccaggcagccgtctcccgccccaggcggcatcccccagtccctcccgcctccacgagagcctggagctctcagcctcgcccggggctccactctctcctccggctccctgggctgttttgctctaacgatcttgccagatccctccctctgtagacaaccaccaacctctgtttgctgttgaattctctcctcacattacccaggtctgctcaagacatgattttggttttggtttctgagggttctagtgggcagaaggttggagggacacttatgagggtggccgggggtctgacgctgcactttggaaaaactcacacagttgaatttccaaagaaatctgccctttgccctctttgcacctttgatacattctggaagttttctcaggctttggacacttctggggatggaggtgtggagaagtggggagttccctctcttcatagtaaataactctgaaatatgtgaatgtgaatggcaggagaatctggccaaggatggggccgaaaagggtggttctaattgtttgcttctgatgttgagtctttagctgaccccacaggcaggtttccaaggtgcaaagagatctttcccgagtcagcggccccatcctcatcctccctccctttacttcctcactgtgcagtctccctcaaggatctactgtgaaaggtgtgtttgtagtgatatccaacctaactcagtaacgaagtcgttacttagctcttagctgtgaaataactctggaaacttccccaccccaaccataaattcttacttataaagaaacaggtccccaaactggaaacagcttagtccaggcctcagcgagaaggaaggacaccatgactgctccatgctgggcacagccgggcagtcttgccaagtgcctgctggaggctgtgccggcaagaggcctgcagcaaggagattcccttccctcgggccattatcaatactgtctttatctggaggtggggaagcgcagccctctgagacagcaggacaatggtcagttcagagagggtgagggcagcaaacgcttcagaggacacagaagccagaggacccccccccgccccacagctgggtcagcctggaaaatccatctattagggactttttggcagccagatggcagcaatagcccattaggtctcatcccgagttccaagtcttggctgcaaatgagcctcagttcgccttactggagagcacccccagattcctgggcacagttcatttccagccctttctagatctgatcttttagggggaaagacagcttaaaatgttcttttcattttaaagaaaattattctgtctgcttaagttggaggctacttactctttcacctgacattttctttccttttattcttccagatcaggaatgaaatttccatgctgctcataaagataatattattgtactaattatttttattaccattgtaattatgatcattatgttgatattttagtcagggttttaaatgcacatttattccaagtatctttgtgttttctctttaatatttaaacttattctctctgtgagtatataagtagactggagggacatccagatgtccagttttgtcaggcaaaaaaaaaaaggaaagacttaggaagtaggaaaattgtttctgtcatctctatcccaacaagagacgtcaagaaagatccaccacagaacaaaagtttaaagaagaatcaaagccttgattgggcttctgacaacatggtcaccatcaaggttgtcattttctagatcccagaggcctgggatgcgacgtcaggtggcatctcatgggctcggggaatgtcgagtcactgactgtccagcccttagccagcttctctcccacatcctcagagctctcctgtgcttctgaaatctgttaactaaatctttggcttgcctctggtatttaagcaagaaaattccctcccagaggtgaccccatccgcttccccacaatccatccttttgccatcggcgcacctggggcgtggcttaggttcttcaatgcagggacatttgccccctcccagaagctgctgggcacagtgaggtggcgtaagagtgactggcaggtggtaccttccccaggaaatttcaccacaccacccagttcctcagcctgccccctccccctgtgatgcatgcccccagcacccaattctagccagctggaagtgggtggagggacagcaggaggccagagaaaccctgaacaaagctgggcggctgctcaggcatcacaggctgcaccccctctgaaagcatccccactgggctccggccacatcttcagtgcactgtgctgtgtgcgctgggtgctcacacgctgtccccagacccacaaagtgctaggccccagttgaagaaaggggtgaaatagccagcttcaccgaagggaagggaagggaagtattgggcgatgccagccccacagacgctcagcaaacattagtgcacattctcctagtcctcacccaatggcctcctctacccccatgcatggagctgccacatcagaagccccaagagaagctccctgcaggagaggccagctccctggatgcccaattgcatacctggccgaatctgccattgagtcaccttagcaaataggctgctgtcactaggaccaagctctcaagcagagggatgccaacctagtccttacttagcccacgaatcatctagagcatcctctagtcttttgtgggctccctccttcccatttgaagagacattgttcagaggaagaggggaagatttgaaatgtcaggtcacggaggagtgtttaactggagcctggtgaaccgcagggcaatttgcttctgctcactgggttctgactggcccgtctggacgtgggcccccatgtctctgtgcttagggcctcttcatgatgttttggatgtttccaagggaagtgggtgagcagatcaaggggtgggagagtcgaggcttgatgccagttaatactgtgaagtggagcgtgcggtcagtggaattcagaggaaaaagaagggttggagcaaagcggcattcatctcctggactgttagcctttctagtcttcctggtggctgaggtgttcacgggctgggggagccagctgacctttgtcctcttcaacctagaagactcagcccgcccagacaccaacgtgtgagacggatggacatcaggaagggaaggggagattagcccaactgctgacagaacgatttcccttggttggaccttgggaatggcaaacactcatattggaacaagcttggggtggaagatttaggccgtgtgagcatgtgtgagtgagtggaacaaactttcttggaaactggagggaggagatgaggaggcttcgggaagtattactgatggctcatggttgagagagcgacgtggggacccagctcgccccagcttttgtcccaggttctctttgtctgatgctgagggcagggtggggtgtgggaccaccactcttgttggcctgtcaagtagaccctaggacagaaaatggaaagaaggaaatggctcggtgctctcaactagcagagagaattgaggagaggtaagggttccttctgcaggccagcctgggactccacagcgccagcaggagtgacttggccacaagacattccagccccagggactttgcaggcttcattccctgtctgtgtcttttccttctggtgtgttttacagacttctgatggggaagcttcaaacttgagcaggccagagatgtccttaccaaattggaaaggaaggtgaaactgttcctttctttagccaaagaacccttctcaaagacgcctccagaaatggacaaaatggccttcccttcgttcctttccaggcaataatgacatcattagtgatgcaattctatttgtctttctctttcctctctgtccttttttttaaaaaaaaaaaatgcatttatttcaaaactgtgctattcttttaagaggagtggaggtgaccccttcgatgctgctgctatcgggagacaaggtgccataccaatacgtgggcttgactaatcccaggccaccatgggagagagcaaagcagggctgccaggagttcagttgcatcaagggcgtagagcacgcgggggctgggctcggaatagcagtacttttccactttgatgccttagaactctcacttctcatctccacagaccagactcagtaaaatctcaggccactagagaatggaaggcggtgaaacaggatttaaatgcaaaaaaaacctattggaggcttttggcaccgtggctcactagagggacccagcatagtagaggtttctcttgttgcagcttctgaaaagttcaaaaaagaactccaggccgttcttccctcaaacccagtgagagtttgcagagaagtgccccctgcagggctcccgtcccagaacaccagcaccagagagggtcttcccgatgccccccgctggacttgcccaagcctctgggagcccctcatctcagatccctgtgttgaacatgacactgactgtcccttatttgttaaaatttgcaatatctctcaagtaaataatagccaacatttgttgaatgctttcatgactcccgggctaaggcctttatgagcgttgtctcaaggggccccaacagccatcccacagggagggggataacagcccccatttatagataagggagctgaccggatgctctgagaagtggcaggtgttgaaggaaggataaagcagtgatgggccagaatccccaaggttcccttttttgttcatcaggcccttcctgagatgtgatttttaatcttttaactttttttaattaatagcaatgcgtggcctcatatttctatgaaccatttagtgatactcccgcttcctgcatgccacacactgtgctgggaattgctcatgggttgtcctgtttcatcttctccgtagccctgtgagatcggcaatattagtccccctacagccaaggaaactgcccagagccacacaactcttgaggggcgaggagggcttgaacctgagtctgcccagctccagaactgagcttgcagccattagccacagctgtctcctgcatgtctgagcaaagaaaggcctttacacagcatcaccctgtgccatcccatgcaccgtgggactcagctaaaggactgtgcaaagagggggctcctgagttggatttaggcaaaaggggcagaattcgtttgatttttagagaaaatctctggagagtttcttttgattcatagaattccttttagatttctttccagcataccaactagctttagtagtgctgctacaaccagctcttataagtaagagtgaaaaagtattcttttcttctttaaaaaataagtttttcttgcttatagttaattctagaaaggcaatactaaaggtatatatttttttcaaaatgctattttttactgcacttgataattatcctgacagctctgatctctgtaatagattcactcttcagctctgggcagaaccagaggcagggttcacaccaaatttgtaaataccatatgtgggtctggtgtccaggaacttttttctttctgttaaaaaaaagaaaaaaaaaagaaaaaaaaaaagaagtagaggtggaagaaagacaagacttagaggaacaaaagaatgttttcttttgagatactcttctcaaagaaatagcaacaattgtataaacaggaaaaccagccagctttcatgataaaaggaaggcgtgtctcttgccctggtatgagattaacagaaatacagatgcatttttattttgattgaaagatggtgagaatgtagaaatgcttaggactagatttttaattttttaaaataactattatcatttattatgaaatatttgttcagttgttttgagtgggtttcttgttccttttttcatttaaaaccttctttgttgactggctccaggcttgtttgcctaaattcttaggtagtttacacaagttctagaatcttttagaactttaactccattggaagcaaacctaactaatcggagtttgagatcctggttggtttcaataggtattctggaattctggcagaacacctaaagattttttttttttttagaaggttttagatacattatcttacacaaactgtgacctaatggcaataattacctcaaatgtgggcattcatcctggttttagccttttttgaaatcatgtagccagcttgatcttggaatttaaagactatgaattctctgtgggctgaaaataatgattacttcatacccccggtcatcgttgcttaagtgaattctgaaaatagctcatctttacaacaaaaattaaaccaaggaagagattattctttgtgtgttgtactcaaatgcgatgttcaaatgcacatgttaagtatatatgtttttagctactgtaaaatgctgttagccttctaagctatcaaaacagtcacattttaaatgagtaaactaaacaattgactgtggatacttaagcatatttctggctacgttttatagttaaagtgttttatagtttacatttagactggtactttttaaagaaaagttctgtttataactgacatccgcaaaccccagtgaatgcctcttagttggaggttgtgtctcccccaaggcaagtgtgttgtcccagactcttctgtagtccagcatgcgcacttccctctggattattactttccacgtgaactcaagagaacatgaaaggcaatccagatggagggaaaaggtgtgagtccgcagcccgggccagatgcgaaggtctcatgcgtgtcgtctaaacacttgtcttcaaggccttctctctgacatcttggaagagtcattgagaacagataacctggttcattgatttttgtcttgatttgaatatttaacttattaatagatccactgatttccaggcaccaggcagtagaagagactgggattcaggtgaccatgaaggcacagctgctacttctgggccgggggtgatattttgatcagcgttttgtaggggaggaccatatacccctattcccatggtcgctggctgggttttccatatatctgctgtcatttattcgttttccccttaaaagcaaaatcaatgtaaaaggctatgtttacgttttactcattgtccagcttagactcaaagtctagttcggtgggagggggaccttagcatcctctcagagatggtcagggctgagcaggaggaggcagagacagaggggcagctcagcctggtccattgagacccactctaaacagacatcatatttggaacaagaagatgcttcgagacaggaatgggccccactgtcatgcagaaacagactgggggaatggcagtttccctgagtcttggtttcttttatgttttctcttgtgccaccaccaaactgcagaggacctgctgtgacctaaagggcattcctttagcagataagaccttgaaaactgcaaaacacctgggaccagggagcttttaaaaaatacaaaaaaataccacatttgctttttccctgtgaactgtattgacagcgtgttcttaggacagtcttttggtggaaatgttactgtaaaatagttttcatctcacccctcctaatcatactcccactttcctgtttgtgtggtggtgttgctgttttttcctttacatgaattaaccaaatgaattttgtgtcattgtttttggggcttatatttttaaaacatagaaattgccttttgttcatttgaaaagtaagtatgttgtatctgaaaaagggctctgcctctgctctccctcgcttccttgtaaccaatctccaaacgaatctctcctggcaccgcccccttccttatatagggtcactgtccccggggccacctctgcctccaccctgctgtcaccactgccctgggccaaggcacccaggactcccagaaagcgcgagagccagcaagaaggccccactcagccttgagactggtggtcacacctccctgtcagagtcgcctgctgggctgaaggggcaatggattgtcattgttgaaattgtttggctcaggttataaggaggaacttgggaagtagaaagtgacttgaccatgtgcatccttggtagcttcctgtaactaacaaatggaacagagagcacacccccgccccgccccaccccaagcagatgttcccgtcagcgctgccctgagtcagtcggtcccccgtttctgctctcctcccttttgtgttcctgctcacttcaagcttcttccatggactttccagggcacagtcatctctagcccccaaatcatctcttcatcctctgtgtgtgcatttttttaaccaaatgaaatagacaagaaagtcatactttggggcagcagaatttctaatttagtagaatcactgtatagagatagatgttgatatatatgtttgtgtatatatatcaaaccaaattggataggagaagtatagctttacagatgaggagaaggagctctttagaggtcggagtcaagactggtgtcttggacgtgcatgggctgtgtcccaggccactccgcacacatggggctgaggcgtggcgccgggcccttgtcatccacctcaccacggcagagccagcaggccctgtagggtgctgctgctgtctcactgggtcccagcttcaagcgcatcagtgggtgacgggggcaacaaatcagagtgactggaagtttccatcccgttttgctttgaccacgtgtactgagctgcagcctctgatactctgtcacgtttccaaaaatggtatccattaggatagaaagagaatggatctgcagaaatgtttacctttcaactgctcatgaattcaggacactggatagaaagactcactccccaaaatgagaacagggaagaggagacccggcgacactaagtcaccaggtccaaggaacgtggctccctccccagggtcatctcacctagatctttctctcccaggtcatctcagctcaatctcaataaccctatgaaagccctggtctgttgtgttccttcaccgtacggtttctgtaataaaaagtgttaatccatgttaatctgtgtgaaaattattgcgtgcaacagtattttctcgtgtacctctttttcctatgtgaattgtccctcttttttatttataaatgtctacttttgtttttttaaagacaaaccaatgtgttgtagacctatatgtaacctattccttagtctcatattataggtatgttataagaatggatattttacttggctttagaatgttttacaagaaaactaattcttaactgatcaagtccttgctactaaaatgcttgtgtttttcatcatgacgtcgtgtgcttctaaattaatcattttcgttgtagaaaaatggagtgaatttatattagtcttggaaactaataatagcattgtaaatttatgagatgattttaacagaaaaaatatagaagaatatagttattttaattgtaatattactaactgtagggtgagaaaaaggggggggggtcccattgtggtgaactatgttatagcttgttactcatagtttctttttgatcattttttcggtctccgaggtgaaatgacttattaattaaaatttgtaaactcacatatgcatattgtatatgtgtagaaatgtaatcacactttgtcttggaattacattaaactgtttgaaatcactgtaaaaaaaaaaaaaaaaaaaaa

SEQ ID NO: 19 - DNA, 2300 bp, Homo sapiens
ttattgtggtttgtccgttccgagcgctccgcagaacagtcctccctgtaagagcctaaccattgccagggaaacctgccctgggcgctcccttcattagcagtattttttttaaattaatctgattaataattatttttcccccatttaattttttttcctcccaggtggagttgccgaagctgggggcagctggggagggtggggatgggaggggagagacagaagttgagggcatctctctcttccttcccgaccctctggcccccaaggggcaggaggaatgcaggagcaggagttgagcttgggagctgcagatgcctccgcccctcctctctcccaggctcttcctcctgcccccttcttgcaactctccttaattttgtttggcttttggatgattataattatttttatttttgaatttatataaagtatatgtgtgtgtgtgtggagctgagacaggctcggcagcggcacagaatgagggaagacgagaaagagagtgggagagagagaggcagagagggagagagggagagtgacagcagcgctcgcgggggctcaacccccagacctccagaaatgacgtcagaatcatttgcatcccgctgcctctacctgcctggtccagctgggaccctgcctcgccggccgcatggccagagggttggaaattaatgatcatgagctcgtatttgatggactctaactacatcgatccgaaatttcctccatgcgaagaatattcgcaaaatagctacatccctgaacacagtccggaatattacggccggaccagggaatcgggattccagcatcaccaccaggagctgtacccaccaccgcctccgcgccctagctaccctgagcgccagtatagctgcaccagtctccaggggcccggcaattcgcgaggccacgggccggcccaggcgggccaccaccaccccgagaaatcacagtcgctctgcgagccggcgcctctctcaggcgcctccgcctccccgtccccagccccgccagcctgcagccagccagcccccgaccatccctccagcgccgccagcaagcaacccatagtctacccatggatgaaaaaaattcacgttagcacggtgaaccccaattataacggaggggaacccaagcgctcgaggacagcctatacccggcagcaagtcctggaattagagaaagagtttcattacaaccgctacctgacccgaaggagaaggatcgagatcgcccactcgctgtgcctctctgagaggcagatcaaaatctggttccaaaaccgtcgcatgaaatggaagaaggaccaccgactccccaacaccaaagtcaggtcagcacccccggccggcgctgcgcccagcaccctttcggcagctaccccgggtacttctgaagaccactcccagagcgccacgccgccggagcagcaacgggcagaggacattaccaggttataaaacataactcacacccctgcccccaccccatgcccccaccctcccctcacacacaaattgactcttatttatagaatttaatatatatatatatatatatatatataggttcttttctctcttcctctcaccttgtcccttgtcagttccaaacagacaaaacagataaacaaacaagccccctgccctcctctccctcccactgttaaggacccttttaagcatgtgatgttgtcttagcatggtacctgctgggtgtttttttttaaaaggccattttggggggttatttattttttaagaaaaaaagctgcaaaaattatatattgcaaggtgtgatggtctggcttgggtgaatttcaggggaaatgaggaaaagaaaaaaggaaagaaattttaaagccaattctcatccttctcctcctcctccttccccccctctttccttaggccttttgcattgaaaatgcaccaggggaggttagtgagggggaagtcattttaaggagaacaaagctatgaagttcttttgtattattgttgggggggggtgtgggaggagagggggcgaagacagcagacaaagctaaatgcatctggagagcctctcagagctgttcagtttgaggagccaaaagaaaatcaaaatgaactttcagttcagagaggcagtctataggtagaatctctccccacccctatcgtggttattgtgtttttggactgaatttacttgattattgtaaaacttgcaataaagaattttagtgtcgatgtgaaatgccccgtgatcaataataaaccagtggatgtgaattagtttta

SEQ ID NO: 20 - DNA, 1602 bp, Homo sapiens
ggcttaggctgagccgtggccgccacagcccatcgtaatgccgcatggtgcttggcactccagagagccaataggaatgaaagaattcatttgaatcggccaatgccggcgggttagggggcgggggttgaaaaccctataaaggcgtcgatcggccggacaggcggcagcggcggctcctgcagcggtggtcggctgttgggtgtggagtttcccagcgcccctcgggtccgaccctttgagcgttctgctccggcgccagcctacctcgctcctcggcgccatgaccacaaccaccaccttcaagggagtcgaccccaacagcaggaatagctcccgagttttgcggcctccaggtggtggatccaatttttcattaggttttgatgaaccaacagaacaacctgtgaggaagaacaaaatggcctctaatatctttgggacacctgaagaaaatcaagcttcttgggccaagtcagcaggtgccaagtctagtggtggcagggaagacttggagtcatctggactgcagagaaggaactcctctgaagcaagctccggagacttcttagatctgaagggagaaggtgatattcatgaaaatgtggacacagacttgccaggcagcctggggcagagtgaagagaagcccgtgcctgctgcgcctgtgcccagcccggtggccccggccccagtgccatccagaagaaatccccctggcggcaagtccagcctcgtcttgggttagctctgactgtcctgaacgctgtcgttctgtctgtttcctccatgcttgtgaactgcacaacttgagcctgactgtacatctcttggatttgtttcattaaaaagaagcactttatgtactgctgtcttttttttttttcttttgaagaacaggtttctctctgtccttgactcttgggtctgtgggccatggcatgagtgttttctagtagtagattggagggaaagctttgtgacacttagtactgtgtttttaagaagaaataatttggttccagatgtgttagaggatcttttgtactgaggtttttaacactttacttgggtttaccaagcctcaactggacagaccataaacagtccacaggcaccgttcctgccaggccccaacccacagggagtctctccgcagagccttcttggtgttgccctaacttgccagtggcctttgctcagagcctcctcctgtgacatgtgaacaatgaagaggcctgcgcctcctgccttgccgcctgcaaagcaaagaaactgccttttattttttaaccttaaaaagtagccagatagtaacaagactggctggctgatgagcaaagcctttgctctcacgcagaggaaggcttggatgtacaatgaaactgcctggaactaaaagcagtgaagcaagggaggcaatcacactgaagcgggtcttcctccaggaacggggtcccacaggcgtgttgttttaaataacctgatgctgtgtgcatgatgctggtgcttgaccatgaaaggaaagtctcatccttaaaatgtgttgtacttcacaatcctggactgttgcttcaagtaaacaatatccacattttgaaa

SEQ ID NO: 21 - DNA, 3044 bp, Homo sapiens
gctttattgtttgcttgttttgttccggagtcggggccgggagggagtgcaggaggagggatccaagcttccaagcctctgctccgctctccttctatccagttggtctttagggcactgaaggaaactcttcttcagaaataaccttttaacttttcttctgtcagctgcctgccaatcacggagccagaggctgaggggaggctttgagccggtctgcgagtccggaaggcaaagatcgcgaagcttggcgctccagaacgctcagggggcaggtgacacagtcgtgggttccccggcgggcgctggcttgacagtttcctccccgcccactggcaggggagcgccccgccgggctgcacgcgcgcgcgcgcaggggggcataaaagccgcggccgcgcggagacgcggagctcgcccaccgcccgccccagcagtggctgcaccatgcacgtgaacggcaaagtggcgctggtgaccggcgcggctcagggcataggcagagcctttgcagaggcgctgctgcttaagggcgccaaggtagcgctggtggattggaatcttgaagcaggtgtacagtgtaaagctgccctggatgagcagtttgaacctcagaagactctgttcatccagtgcgatgtggctgaccagcaacaactgagagacacttttagaaaagttgtagaccactttggaagactggacattttggtcaataatgctggagtgaataatgagaaaaactgggaaaaaactctgcaaattaatttggtttctgttatcagtggaacctatcttggtttggattacatgagtaagcaaaatggaggtgaaggcggcatcattatcaatatgtcatctttagcaggactcatgcccgttgcacagcagccggtttattgtgcttcaaagcatggcatagttggattcacacgctcagcagcgttggctgctaatcttatgaacagtggtgtgagactgaatgccatttgtccaggctttgttaacacagccatccttgaatcaattgaaaaagaagaaaacatgggacaatatatagaatataaggatcatatcaaggatatgattaaatactatggaattttggacccaccattgattgccaatggattgataacactcattgaagatgatgctttaaatggtgctattatgaagatcacaacttctaagggaattcattttcaagactatgatacaactccatttcaagcaaaaacccaatgaacagcttatgtgttagccatagctgaaaataagcacaaatagcttatattcagatcctatcttcatttgaatatagcttttaaatgaaatgttacagtttgaagttttccttcatgcacttggtgataaacgttttctaaatttttagttaagtatatggataaaaagttatgaactattaaaaatgtgatgtggaccaaaggctaggttgtaatcttgatagtctaaaaaatgatcaaaacaaatgattttcaaggaatattcaatattctgcctttcagaaagtgtatttatatctgtgcttcataaatattaatgttcttcagaacatcattttaaaggagatacttgaattgttatttaaatcaaaccagatgtaaaacactcacatacaagttcatactttaaaagaggaaagctacttaacaatgacaaatatttcacaataataatttttacttatataccatctttcaactgaacatttcagttcttccaagagcttcttagagtagtatattttgggggcagtcaaggaataaactacagtgtaaacatatcccagatgaaaactgctgtatggaaaaatgacagaaagtaactgattgacactgttgattcacagttcagcctcctatctgggaaagacatttctttcctctgctcactttaagaacttttaccgactccaaaaatctcaggaattaaacttttaacagttacagcaataaagaatagttagtactccaaaaatattatatttaagatgctcaacaagaaaaaaatgcaaatgtaatatttttttcaaattacttctttattgacttgtccaaatttcaaaagtgcctacccttcaataaaacttttttattctgatctccataaattacttagtcttctatgtatagctatcaaggaaataaaaccaattttgccacagccacaactgtaaatgtttttgtacccatgctgaaactcataacaacacagacataaaaatagctgtgaggttttgctttttttgttgtcagctatcttaagaatcattaaatacacctgctttgggtaaaactctttgcaagcagtaattaacactagtaacagtgaaagcacaagatttccaaatcagtcgttttctcaaaaaaatatcgtataagtgactcatcctgtctgctaactccagacctcccagcttgaagccaaatctttccatgtgagattgatatggatttcctagaagtactggaatgttgtcatatcttgccctattttaattctgctatagaaaacaattgccttcacttttaaggagtaatttgaatattaataactctggtctagattttcatataatgtattaaagacaaagtagtgaacatcaatgaacatctgatagagataaactgtaatcaggcataagcttgtttgtatgttctggcagtgactaatcagtaaatgatgtcggtttgcccagtatcacttatcttctgtatttttcctctgtcgtgtaaatagtataaccttttcatttatggacaattttttggactagtagccttcaatatacattctgctttgaattaattttttcaaatcaataaattatgtagacatttaaaatcaaatatcaagtagaattgaaaaatgtgagttacataagttaaaaacttactttaaatcttaccttctataggtagctctaaataaattcatatggttatatggcatctctggtgtatactgattgagaaaataattaaactgaagttaggggaggggaaaaaaaaaaaaaaaaa

SEQ ID NO: 22 - DNA, 2389 bp, Homo sapiens
tcgagcccgctttccagggaccctacctgagggcccacaggtgaggcagcctggcctagcaggccccacgccaccgcctctgcctccaggccgcccgctgctgcggggccaccatgctcctgcccaggcctggagactgacccgaccccggcactacctcgaggctccgcccccacctgctggaccccagggtaaggacaagggcccccagactcacagttccagccctgaggacaggggttccctcatccccccacccagcctaatgcccacctcctaatagaggggttcctggggacctgaagagggggcactatgacgtccccccaagcacctaggtgttctgtcctgctcttccttcagactcagccgttggaccccagtcctttcctccccagacccaggagttccagccctcaggcccctcctccctcatactagggagtcctggcccccaaattcctcctttcccaagacttatgatttcaggtcctcagctgtctcctccctcaaaccgggatcctcagtcccctgctccaccaggctcaggcatgggggtccccatccctgcaaatccaggcgtccccccgctgctggtcagacactgaccccatccttgaacccagcccaatctgcgtccgtgatcacggcgtgctctggccaaggcccagtccctacagcctgcctggatggacgcctgggactgggggcgccaggactgggctgggctgggctcccccaggccctgcctccccgtccatctcctcacaggtcccaccctggcccaggaggtcagccagggaatcattaacaagaggcagtgacatggcgcagaaggagggtggccggactgtgccatgctgctccagacccaaggtggcagctctcactgcggggaccctgctacttctgacagccatcggggcggcatcctgggccattgtggctgttctcctcaggagtgaccaggagccgctgtacccagtgcaggtcagctctgcggacgctcggctcatggtctttgacaagacggaagggacgtggcggctgctgtgctcctcgcgctccaacgccagggtagccggactcagctgcgaggagatgggcttcctcagggcactgacccactccgagctggacgtgcgaacggcgggcgccaatggcacgtcgggcttcttctgtgtggacgaggggaggctgccccacacccagaggctgctggaggtcatctccgtgtgtgattgccccagaggccgtttcttggccgccatctgccaagactgtggccgcaggaagctgcccgtggaccgcatcgtgggaggccgggacaccagcttgggccggtggccgtggcaagtcagccttcgctatgatggagcacacctctgtgggggatccctgctctccggggactgggtgctgacagccgcccactgcttcccggagcggaaccgggtcctgtcccgatggcgagtgtttgccggtgccgtggcccaggcctctccccacggtctgcagctgggggtgcaggctgtggtctaccacgggggctatcttccctttcgggaccccaacagcgaggagaacagcaacgatattgccctggtccacctctccagtcccctgcccctcacagaatacatccagcctgtgtgcctcccagctgccggccaggccctggtggatggcaagatctgtaccgtgacgggctggggcaacacgcagtactatggccaacaggccggggtactccaggaggctcgagtccccataatcagcaatgatgtctgcaatggcgctgacttctatggaaaccagatcaagcccaagatgttctgtgctggctaccccgagggtggcattgatgcctgccagggcgacagcggtggtccctttgtgtgtgaggacagcatctctcggacgccacgttggcggctgtgtggcattgtgagttggggcactggctgtgccctggcccagaagccaggcgtctacaccaaagtcagtgacttccgggagtggatcttccaggccataaagactcactccgaagccagcggcatggtgacccagctctgaccggtggcttctcgctgcgcagcctccagggcccgaggtgatcccggtggtgggatccacgctgggcctaggatgggacgtttttcttcttgggcccggtccacaggtccaaggacaccctccctccagggtcctctcttccacagtggcgggcccactcagccccgagaccacccaacctcaccctcctgacccccatgtaaatattgttctgctgtctgggactcctgtctaggtgcccctgatgacgggatgctctttaaataataaagatggttttgattaaaaaaaaaaaaaaaaaaaaaaaaaa

SEQ ID NO: 23 - DNA, 914 bp, Homo sapiens
gcatggggaggggcggccctcaaacgggtcattgccattaatagagacctcaaacaccgcctgctaaaaatacccgactggaggagcataaaagcgcagccgagcccagcgccccgcacttttctgagcagacgtccagagcagagtcagccagcatgaccgagcgccgcgtccccttctcgctcctgcggggccccagctgggaccccttccgcgactggtacccgcatagccgcctcttcgaccaggccttcgggctgccccggctgccggaggagtggtcgcagtggttaggcggcagcagctggccaggctacgtgcgccccctgccccccgccgccatcgagagccccgcagtggccgcgcccgcctacagccgcgcgctcagccggcaactcagcagcggggtctcggagatccggcacactgcggaccgctggcgcgtgtccctggatgtcaaccacttcgccccggacgagctgacggtcaagaccaaggatggcgtggtggagatcaccggcaagcacgaggagcggcaggacgagcatggctacatctcccggtgcttcacgcggaaatacacgctgccccccggtgtggaccccacccaagtttcctcctccctgtcccctgagggcacactgaccgtggaggcccccatgcccaagctagccacgcagtccaacgagatcaccatcccagtcaccttcgagtcgcgggcccagcttgggggcccagaagctgcaaaatccgatgagactgccgccaagtaaagccttagcccggatgcccacccctgctgccgccactggctgtgcctcccccgccacctgtgtgttcttttgatacatttatcttctgtttttctcaaataaagttcaaagcaaccacctgtcaaaaaaaaaaaaaaaaaa

SEQ ID NO: 24 - DNA, 1660 bp, Homo sapiens
ggtgcactagcaaaacaaacttattttgaacactcagctcctagcgtgcggcgctgccaatcattaacctcctggtgcaagtggcgcggcctgtgccctttataaggtgcgcgctgtgtccagcgagcatcggccaccgccatcccatccagcgagcatctgccgccgcgccgccgccaccctcccagagagcactggccaccgctccaccatcacttgcccagagtttgggccaccgcccgccgccaccagcccagagagcatcggcccctgtctgctgctcgcgcctggagatgtcagaggtccccgttgctcgcgtctggctggtactgctcctgctgactgtccaggtcggcgtgacagccggcgctccgtggcagtgcgcgccctgctccgccgagaagctcgcgctctgcccgccggtgtccgcctcgtgctcggaggtcacccggtccgccggctgcggctgttgcccgatgtgcgccctgcctctgggcgccgcgtgcggcgtggcgactgcacgctgcgcccggggactcagttgccgcgcgctgccgggggagcagcaacctctgcacgccctcacccgcggccaaggcgcctgcgtgcaggagtctgacgcctccgctccccatgctgcagaggcagggagccctgaaagcccagagagcacggagataactgaggaggagctcctggataatttccatctgatggccccttctgaagaggatcattccatcctttgggacgccatcagtacctatgatggctcgaaggctctccatgtcaccaacatcaaaaaatggaaggagccctgccgaatagaactctacagagtcgtagagagtttagccaaggcacaggagacatcaggagaagaaatttccaaattttacctgccaaactgcaacaagaatggattttatcacagcagacagtgtgagacatccatggatggagaggcgggactctgctggtgcgtctacccttggaatgggaagaggatccctgggtctccagagatcaggggagaccccaactgccagatatattttaatgtacaaaactgaaaccagatgaaataatgttctgtcacgtgaaatatttaagtatatagtatatttatactctagaacatgcacatttatatatatatgtatatgtatatatatatagtaactactttttatactccatacataacttgatatagaaagctgtttatttattcactgtaagtttattttttctacacagtaaaaacttgtactatgttaataacttgtcctatgtcaatttgtatatcatgaaacacttctcatcatattgtatgtaagtaattgcatttctgctcttccaaagctcctgcgtctgtttttaaagagcatggaaaaatactgcctagaaaatgcaaaatgaaataagagagagtagtttttcagctagtttgaaggaggacggttaacttgtatattccaccattcacatttgatgtacatgtgtagggaaagttaaaagtgttgattacataatcaaagctacctgtggtgatgttgccacctgttaaaatgtacactggatatgttgttaaacacgtgtctataatggaaacatttacaataaatattctgcatggaaatactgttaaaaaaaaaaa

SEQ ID NO: 25 - DNA, 1464 bp, Homo sapiens
agccccaagcttaccacctgcacccggagagctgtgtcaccatgtgggtcccggttgtcttcctcaccctgtccgtgacgtggattggtgctgcacccctcatcctgtctcggattgtgggaggctgggagtgcgagaagcattcccaaccctggcaggtgcttgtggcctctcgtggcagggcagtctgcggcggtgttctggtgcacccccagtgggtcctcacagctgcccactgcatcaggaacaaaagcgtgatcttgctgggtcggcacagcctgtttcatcctgaagacacaggccaggtatttcaggtcagccacagcttcccacacccgctctacgatatgagcctcctgaagaatcgattcctcaggccaggtgatgactccagccacgacctcatgctgctccgcctgtcagagcctgccgagctcacggatgctgtgaaggtcatggacctgcccacccaggagccagcactggggaccacctgctacgcctcaggctggggcagcattgaaccagaggagttcttgaccccaaagaaacttcagtgtgtggacctccatgttatttccaatgacgtgtgtgcgcaagttcaccctcagaaggtgaccaagttcatgctgtgtgctggacgctggacagggggcaaaagcacctgctcgggtgattctgggggcccacttgtctgtaatggtgtgcttcaaggtatcacgtcatggggcagtgaaccatgtgccctgcccgaaaggccttccctgtacaccaaggtggtgcattaccggaagtggatcaaggacaccatcgtggccaacccctgagcacccctatcaaccccctattgtagtaaacttggaaccttggaaatgaccaggccaagactcaagcctccccagttctactgacctttgtccttaggtgtgaggtccagggttgctaggaaaagaaatcagcagacacaggtgtagaccagagtgtttcttaaatggtgtaattttgtcctctctgtgtcctggggaatactggccatgcctggagacatatcactcaatttctctgaggacacagataggatggggtgtctgtgttatttgtggggtacagagatgaaagaggggtgggatccacactgagagagtggagagtgacatgtgctggacactgtccatgaagcactgagcagaagctggaggcacaacgcaccagacactcacagcaaggatggagctgaaaacataacccactctgtcctggaggcactgggaagcctagagaaggctgtgagccaaggagggagggtcttcctttggcatgggatggggatgaagtaaggagagggactggaccccctggaagctgattcactatggggggaggtgtattgaagtcctccagacaaccctcagatttgatgatttcctagtagaactcacagaaataaagagctgttatactgtg

SEQ ID NO: 26 - DNA, 2855 bp, Homo sapiens
agccccaaactcaccacctggccgtggacacctgtgtcagcatgtgggacctggttctctccatcgccttgtctgtggggtgcactggtgccgtgcccctcatccagtctcggattgtgggaggctgggagtgtgagaagcattcccaaccctggcaggtggctgtgtacagtcatggatgggcacactgtgggggtgtcctggtgcacccccagtgggtgctcacagctgcccattgcctaaagaagaatagccaggtctggctgggtcggcacaacctgtttgagcctgaagacacaggccagagggtccctgtcagccacagcttcccacacccgctctacaatatgagccttctgaagcatcaaagccttagaccagatgaagactccagccatgacctcatgctgctccgcctgtcagagcctgccaagatcacagatgttgtgaaggtcctgggcctgcccacccaggagccagcactggggaccacctgctacgcctcaggctggggcagcatcgaaccagaggagttcttgcgccccaggagtcttcagtgtgtgagcctccatctcctgtccaatgacatgtgtgctagagcttactctgagaaggtgacagagttcatgttgtgtgctgggctctggacaggtggtaaagacacttgtgggggtgattctgggggtccacttgtctgtaatggtgtgcttcaaggtatcacatcatggggccctgagccatgtgccctgcctgaaaagcctgctgtgtacaccaaggtggtgcattaccggaagtggatcaaggacaccatcgcagccaacccctgagtgcccctgtcccacccctacctctagtaaatttaagtccacctcacgttctggcatcacttggcctttctggatgctggacacctgaagcttggaactcacctggccgaagctcgagcctcctgagtcctactgacctgtgctttctggtgtggagtccagggctgctaggaaaaggaatgggcagacacaggtgtatgccaatgtttctgaaatgggtataatttcgtcctctccttcggaacactggctgtctctgaagacttctcgctcagtttcagtgaggacacacacaaagacgtgggtgaccatgttgtttgtggggtgcagagatgggaggggtggggcccaccctggaagagtggacagtgacacaaggtggacactctctacagatcactgaggataagctggagccacaatgcatgaggcacacacacagcaaggatgacgctgtaaacatagcccacgctgtcctgggggcactgggaagcctagataaggccgtgagcagaaagaaggggaggatcctcctatgttgttgaaggagggactagggggagaaactgaaagctgattaattacaggaggtttgttcaggtcccccaaaccaccgtcagatttgatgatttcctagcaggacttacagaaataaagagctatcatgctgtggtttattatggtttgttacattgataggatacatactgaaatcagcaaacaaaacagatgtatagattagagtgtggagaaaacagaggaaaacttgcagttacgaagactggcaacttggctttactaagttttcagactggcaggaagtcaaacctattaggctgaggaccttgtggagtgtagctgatccagctgatagaggaactagccaggtgggggcctttccctttggatggggggcatatctgacagttattctctccaagtggagacttacggacagcatataattctccctgcaaggatgtatgataatatgtacaaagtaattccaactgaggaagctcacctgatccttagtgtccagggtttttactgggggtctgtaggacgagtatggagtacttgaataattgacctgaagtcctcagacctgaggttccctagagttcaaacagatacagcatggtccagagtcccagatgtacaaaaacagggattcatcacaaatcccatctttagcatgaagggtctggcatggcccaaggccccaagtatatcaaggcacttgggcagaacatgccaaggaatcaaatgtcatctcccaggagttattcaagggtgagccctttacttgggatgtacaggctttgagcagtgcagggctgctgagtcaaccttttattgtacaggggatgagggaaagggagaggatgaggaagcccccctggggatttggtttggtcttgtgatcaggtggtctatggggctatccctacaaagaagaatccagaaataggggcacattgaggaatgatactgagcccaaagagcattcaatcattgttttatttgccttcttttcacaccattggtgagggagggattaccaccctggggttatgaagatggttgaacaccccacacatagcaccggagatatgagatcaacagtttcttagccatagagattcacagcccagagcaggaggacgctgcacaccatgcaggatgacatgggggatgcgctcgggattggtgtgaagaagcaaggactgttagaggcaggctttatagtaacaagacggtggggcaaactctgatttccgtgggggaatgtcatggtcttgctttactaagttttgagactggcaggtagtgaaactcattaggctgagaaccttgtggaatgcagctgacccagctgatagaggaagtagccaggtgggagcctttcccagtgggtgtgggacatatctggcaagattttgtggcactcctggttacagatactggggcagcaaataaaactgaatcttgttttcagaccttaaaaaaaaaaaaaaaaaaaaa

SEQ ID NO: 27 - DNA, 9657 bp, Homo sapiens
cggggccagggcagcgcggactcgcgtcccgtggagcgttccaggcgggcgcgcggctttctccccagacccaccgagtggcggcggaggcgagatgcgcgggggcgtgctcctggtcttgctgctgtgtgtcgccgcgcagtgccggcagagaggcctgtttcctgccattctcaatcttgccagcaatgctcacatcagcaccaatgccacctgtggcgagaaggggccggagatgttctgcaaacttgtggagcatgtgccaggtcggcccgtccgaaacccacagtgccggatctgtgatggcaacagcgcaaaccccagagaacgccatccaatatcacatgccatagatggcaccaataactggtggcaaagtcccagcattcagaatgggagagaatatcactgggtcacaatcactctggacttaagacaggtctttcaagttgcatatgtcatcattaaagctgccaatgcccctcgacctggaaactggattttggagcgttctctggatggcaccacgttcagcccctggcagtattatgcagtcagcgactcagagtgtttgtctcgttacaatataactccaagacgagggccacccacctacagggctgatgatgaagtgatctgcacctcctattattccagattggtgccacttgagcatggagagattcatacatcactcatcaatggcagaccaagcgctgacgatctttcacccaagttgttggaattcacttctgcacgatatattcgccttcgcttgcaacgcattagaacgctcaatgcagatctcatgacccttagccaccgggaacctaaagaactggatcctattgttaccagacgctattattattcaataaaggacatttctgttggaggcatgtgtatctgctatggccatgctagtagctgcccatgggatgaaactacaaagaaactgcagtgtcaatgtgagcataatacttgcggggagagctgtaacaggtgctgtcctgggtaccatcagcagccctggaggccgggaaccgtgtcctccggcaatacatgtgaagcatgtaattgtcacaataaagccaaagactgttactatgatgaaagtgttgcaaagcagaagaaaagtttgaatactgctggacagttcagaggaggaggggtttgcataaattgcttgcagaacaccatgggaatcaactgtgaaacctgtattgatggatattatagaccacacaaagtgtctccttatgaggatgagccttgccgcccctgtaattgtgaccctgtggggtccctcagttctgtctgtattaaggatgacctccattctgacttacacaatgggaagcagccaggtcagtgcccatgtaaggaaggttatacaggagaaaaatgtgatcgctgccaacttggctataaggattacccgacctgtgtctcctgtgggtgcaacccagtgggcagtgccagtgatgagccctgcacagggccctgtgtttgtaaggaaaacgttgaggggaaggcctgtgatcgctgcaagccaggattctataacttgaaggaaaaaaacccccggggctgctccgagtgcttctgctttggcgtttctgatgtctgcagcagcctctcttggcctgttggtcaggtaaacagtatgtccgggtggctggtcaccgacttgatcagtcccaggaagatcccgtctcagcaagatgcactaggcgggcgccatcaggtcagcatcaacaacaccgcggtcatgcagagactggctcccaagtactactgggcagcccccgaggcctaccttggaaataagctgactgcgtttggcggattcctgaaatacacggtgtcctacgatattccggtagagacggtagacagtaacctcatgtcgcatgctgacgtcatcattaagggaaacggactcactttaagcacacaggctgagggtctgtcattgcagccttatgaagagtacctaaacgtggttagacttgtgcctgaaaacttccaagattttcacagcaaaaggcagattgatcgtgaccagctgatgactgtccttgccaatgtgacacatcttttgatcagagccaactacaattctgcaaaaatggctctttacaggttggagtccgtctctctggacatagccagctctaatgccatcgacctggtggtggccgctgatgtggagcactgtgaatgtccgcaaggctacacagggacctcctgtgagtcgtgcctctctggctattaccgcgtggatggaatactctttggaggaatttgtcaaccctgtgaatgccacggccatgcagctgagtgtaatgttcacggcgtttgcattgcgtgtgcgcacaacaccaccggcgtccactgtgagcagtgcttgcccggcttctacggggagccttcccgagggacacctggggactgccagccctgcgcctgccctctcaccatagcctccaacaatttcagccccacctgccacctcaatgatggagatgaagtggtctgtgactggtgtgccccgggctactcaggagcttggtgtgagagatgtgcagatggttactatggaaacccaacagtgcctggcgaatcttgtgttccctgtgactgcagcggcaacgtggacccctcggaggctggtcactgtgactcagtcaccggggagtgcctgaagtgcctggggaacacagatggcgcccactgtgaaaggtgtgctgacgggttctatggggacgctgtgacagccaagaactgccgcgcctgtgaatgccatgtgaaaggctcccattctgccgtgtgccatcttgagaccgggctctgtgactgcaaaccaaacgtgactggacagcagtgtgaccagtgcttgcatggctattatgggctggactcaggccatggctgccggccctgcaactgcagcgtggcaggctccgtgtcagatggctgcacggatgaaggccagtgtcactgtgtcccaggtgtggcagggaaaaggtgtgacaggtgtgcccatggcttctacgcctaccaggatggtagctgtacaccctgtgactgcccacacactcagaatacctgcgacccagaaactggagagtgtgtctgcccccctcacacacagggtgtgaagtgtgaagaatgtgaggatgggcactggggctacgatgcggaggtggggtgccaggcctgcaattgcagtctcgtggggtcgactcatcatcggtgcgatgtggtcaccggccattgccagtgcaagtcaaaatttggtggccgggcctgcgatcagtgttccttgggttacagagactttcccgactgtgttccctgtgactgtgacctgagggggacgtcgggggacgcctgcaacctggagcagggtctctgcggctgtgtggaggaaaccggggcctgcccttgcaaggaaaatgtctttggtcctcagtgcaacgaatgtcgagagggcaccttcgctctccgcgcagacaaccccctgggctgcagcccgtgcttctgctccgggctgtcccacctctgctcagagctggaggactacgtgaggaccccagtaacgctgggctccgatcagcctcttctgcgtgtggtttctcagagtaacttgaggggcacgaccgagggggtttactaccaggcccccgacttcctgctggatgccgccaccgtccggcagcacatccgtgcagagccgttttactggcggctgccgcagcagttccaaggagaccagctcatggcctatggtggcaaactgaagtacagcgtggccttctattctttggatggcgtcggcacctccaattttgagcctcaagttctcatcaaaggtggtcggatcagaaagcaagtcatttacatggatgcaccagccccagagaatggagtgagacaggaacaagaagtagcaatgagagagaatttttggaaatattttaactctgtttctgaaaaacctgtcacgcgagaggattttatgtctgtcctcagcgatattgagtacatcctcatcaaggcatcgtatggtcaaggattacagcagagcagaatctcagacatttcaatggaggttggcagaaaggctgaaaagctgcacccagaagaagaggttgcatctcttttagagaattgtgtctgtcctcctggcactgtgggattctcatgtcaggactgcgcccctgggtaccacagagggaagctcccagcagggagtgacaggggaccacgccctctggttgctccttgtgttccctgcagttgcaacaaccacagtgacacctgtgaccccaacaccgggaagtgtctgaactgtggcgataacacagcaggtgaccattgtgatgtgtgtacttctggctactacgggaaggtgactggctcagcaagtgactgtgctctgtgtgcctgtcctcacagccctcctgccagttttagtcccacttgtgtcttggaaggggaccacgatttccgttgtgacgcctgtctcctgggctatgaaggaaaacactgtgaaaggtgctcctcaagctattatgggaaccctcaaacaccaggtggcagttgccagaagtgtgactgcaacccgcacggctctgtccacggtgactgtgaccgcacatctgggcagtgcgtttgcaggctgggggcctcggggctccggtgcgatgagtgtgaaccgaggcacattctgatggaaacagattgtgtttcctgtgatgatgagtgtgtaggtgtgctgctgaatgacttggatgagattggtgatgccgttctttctctgaacctcactggcattatccctgtcccatatggaattttgtcaaacctggaaaatacaactaaatatctccaggaatctttattaaaagaaaatatgcaaaaggacctgggaaaaattaagcttgaaggtgttgcagaagaaacggacaacctgcaaaagaagctcactaggatgttagcgagtacccaaaaggtgaatagggcaactgagagaatcttcaaggagagtcaagacctggccatagccattgagaggctgcagatgagcatcacagaaattatggaaaagacaactttaaatcagactttggatgaagatttcctactacccaattctactcttcagaacatgcaacagaatggtacatctttgctagaaatcatgcagataagagacttcacacagttgcaccaaaatgccacccttgaactcaaggctgctgaagatttattgtcacaaattcaggaaaattaccagaagccgctggaagaattggaggtattgaaagaagcagcaagccacgtcctttcaaagcacaacaatgaactaaaggcggctgaggcgctcgtgagggaagctgaggcaaagatgcaggaaagcaaccacctgctgctcatggtcaatgctaatctgagagaattcagtgataaaaagctgcatgttcaagaagaacaaaatctgacctcagagctcattgtccaaggaagaggattgatagatgctgctgctgcacaaacagatgctgtacaagatgctctagagcacttagaggatcaccaggataagctacttttatggtctgccaaaatcaggcaccacatagatgacctggtcatgcacatgtcccaaaggaacgcagtcgacctggtctacagagctgaggaccatgccgctgagttccagagactagcagatgttctgtacagtggccttgaaaacatcagaaatgtgtccctgaatgccaccagtgcagcctatgtccattacaacatccagagcctgattgaagaatcggaggaactggccagagatgctcacaggactgtgactgagacgagcctgctctcagaatcccttgtttctaacgggaaagcggccgtgcagcgcagctccagatttctaaaagaaggcaacaacctcagcaggaagcttccaggtattgcattggaactgagtgaattgagaaataagacaaacagatttcaagagaatgctgttgaaattaccaggcaaaccaatgaatcactcttgatacttagagcaattcctaaaggtataagagacaagggagccaaaaccaaagagctggccacgtctgcaagccagagcgcggtgagcacgctgagggacgtggcggggctgagccaggagctgctgaacacatctgccagcctgtccagggtcaacaccacattacgagagacacaccagcttctgcaggactccaccatggccactctgttggctggaagaaaagtcaaagacgtggaaattcaagccaaccttttgtttgatcggttgaagcctttgaagatgttagaggagaatctgagcagaaacctatcagaaattaaactgttgatcagccaggcccgcaaacaagcagcttctattaaagtcgccgtgtctgcagacagagattgcatccgggcctaccagcctcagatttcctctaccaactacaataccttaacactaaatgttaagacacaggaacccgataatcttctcttctacctcggtagcagcaccgcttctgatttccttgcagtggagatgcggcgagggagagtggccttcctgtgggacctgggctccgggtccacacgcttggagtttccagactttcccattgatgacaacagatggcacagtatccatgtagccagatttggaaacattggttcactgagtgtaaaggaaatgagctcaaatcaaaagtcaccaacaaaaacaagtaaatcccctgggacagctaatgttctggatgtaaacaattcaacactcatgtttgttggaggtcttggaggacaaatcaagaaatctcctgctgtgaaggttactcattttaaaggctgcttgggggaggccttcctgaatggaaaatccataggcctatggaactatattgaaagggaaggcaagtgccgtgggtgcttcggaagctcccagaatgaagacccttccttccattttgacgggagtgggtactctgtcgtggagaagtcacttccggctaccgtgacccagataatcatgctttttaataccttttcacctaatggacttcttctctacctgggttcatacggcacaaaagactttttatccatcgagctgtttcgtggcagagtgaaggttatgactgacctgggttcaggacccattacccttttgacagacagacgttataacaatggaacctggtacaaaattgccttccagcgaaaccggaagcaaggagtgctagcagttatcgatgcctataacaccagtaataaagaaaccaagcagggcgagactccgggagcatcttctgacctcaaccgcctagacaaggacccgatttatgtgggtggattaccaaggtcaagagttgtaaggagaggtgtcaccaccaaaagctttgtgggctgcatcaagaacctggaaatatccagatcaacctttgacttactcagaaattcctatggagtgagaaaaggctgtttactggagcccatccggagtgttagcttcctgaaaggcggctacattgaattgccacccaaatctttgtcaccagaatcagaatggctggtaacatttgccaccacgaacagcagtggcatcatcctggctgccctcggcggggatgtggagaagcggggtgatcgtgaggaagcacacgtgcccttcttttccgtcatgctgatcggaggcaacattgaggtacatgtcaatcctggggatgggacaggcctgagaaaagctctcctgcacgctcccacgggtacctgcagtgatggacaagcgcattccatctccttggtcaggaatcggagaattatcactgtccaattggatgagaacaatcctgtggaaatgaagttgggcacattagtagaaagcaggacgataaatgtgtccaatctgtacgtcgggggaattccagagggagaggggacgtcactgctcacaatgagaagatcgttccatggctgtatcaaaaacctgatcttcaatttggaacttttggatttcaacagtgcagttggccatgagcaagtcgacctggacacctgctggctgtcagaaaggcctaagctggctcccgatgcagaggacagcaagctcttgccagagccccgggcttttccagaacagtgtgtggtggatgcagctctggagtacgttcccggcgctcaccagtttggtctcacacaaaacagccatttcatcttgccttttaatcagtcggctgtcagaaagaagctctcggttgagctaagcatccgcacgttcgcctccagcggcctgatttactacatggctcatcagaaccaagcagactacgctgtgctccagctgcacgggggccgcctccacttcatgtttgaccttggcaaaggcagaacaaaggtctctcaccctgcactgctcagtgatggcaagtggcacacggtcaagacagactatgttaaaagaaaaggcttcataactgtcgacggccgagagtctcccatggtgactgtggtgggagatggaaccatgctggatgtggagggtttgttctacctaggaggcctgccctcccagtaccaggccaggaaaattggaaatatcacccacagcatccctgcctgcattggggatgtgacggttaacagcaaacagctggacaaggacagcccggtgtctgccttcacggtgaacaggtgctacgcagtggcccaggaaggaacatactttgacggaagcggatatgcagctcttgtcaaagagggctacaaagtccagtcagatgtgaacatcacactggagtttcgaacctcctcgcagaatggcgtcctcctggggatcagcactgccaaagtggatgccattggactagagcttgtggacggcaaggtcttgttccatgtcaacaatggtgctggcaggataacagctgcatatgagcccaaaaccgccactgtgctctgtgatggaaaatggcacactcttcaagctaacaaaagcaaacaccgtatcactctgattgttgacgggaacgcagttggcgctgaaagtccacacacccagtctacctcagtggacaccaacaatcccatttatgttggtggctatcctgctggtgtgaagcaaaaatgcctgcgcagccagacctcgttccgcgggtgtttgaggaagctagctctgattaagagcccgcaggtgcagtcctttgacttcagcagagcgttcgaactgcacggagttttccttcattcctgtcctgggaccgagtcctgaacttcaagcagaatcctcagttggaatcattgctaatattttgaggagaagtgtatgtgtgaattaagaatctcttcagttcatatttcatttccaactcaggttaagtgtttctggggagagatgttgtgtttacgttacactaaaaccacatgtgcaacaaatacctccattaaatggtctaaaatgtaaattgaattccctggctctctttttaaacgtatttttaaaaaaatctttatacacattgaatgttctgttgattacttgatagtattttatgtttttcattttgagctttttaaaaaagtatcaatacagatgataacagatca

SEQ ID NO: 28 - DNA, 3201 bp, Homo sapiens
gaaggagggacggccggtcccgtcagtcaggcagcgggagccgccgggagcggatggcggcggccgtagcggctccactcgccgccgggggtgaggaggcggcagccacgacctccgtgcccgggtctccaggtctgccggggagacgcagtgcagagcgggccctagaggaggccgtggccaccgggaccctgaacctgtctaaccggcgcttgaagcacttcccccggggcgcggcccgtagctacgacctgtcagacatcacccaggctgacctgtcccggaaccggtttcccgaggtgcccgaggcggcgtgccagctggtgtccctggagggcctgagcctctaccacaattgcctgagatgcctgaacccagccttggggaatctcacagccctcacctacctcaacctcagccgaaaccagctgtcgctgctgccaccctacatctgccagctgcccctgagggtcctcatcgtcagcaacaacaagctgggagccctgccccctgacatcggcaccctgggaagcctgcgacagcttgacgtgagcagcaacgagctccaatccctgccctcggaactgtgtggcctctcttccctgcgggacctcaatgtccggaggaaccagctcagtacgctgcccgaagagctgggggacctccctctggtccgcctggatttctcctgtaaccgcgtctcccgaatcccagtctccttctgccgcctgaggcacctgcaggtcattctgctggacagcaaccctctgcagagtccacctgcccaggtctgcctgaaggggaaacttcacatcttcaagtatttgtccacagaggccgggcagcgtgggtcggccctgggggacctggccccttctcggcccccgagtttcagtccctgccctgcagaggatctatttccgggacatcggtacgatggtgggctggactcaggcttccacagcgttgatagtggcagcaagaggtggtctggaaatgagtcaacagatgaattttcagagctgtcattccggatctcagagctggcccgggagccccggggacccagagaacgcaaggaggatggctcagcggacggagaccctgtgcagattgacttcatcgacagccatgtccccggggaggatgaagagcgaggcactgtggaggagcagcgaccacccgaattaagccctggggcaggggacagggagagggcaccaagcagcaggcgggaggagccggcaggggaggagcggcggcgcccggacaccttgcagctgtggcaggagcgggaacggcggcagcagcagcagagcggggcgtggggggccccgaggaaggatagcctcttgaagccagggctcagggctgttgtgggaggggccgccgccgtgtccactcaagccatgcacaacggctcgcctaagtccagtgcctcccaagcaggggctgcagcggggcagggagcccccgcccctgcccctgcctcccaagagccccttcccatagctggaccagcgacagcacctgctccacggccacttggctccattcagagaccaaacagcttcctcttccgttcctcctctcagagtggctcaggcccttcctcaccagactctgtcctgagacctcggcggtacccccaggttccagatgagaaggacttaatgactcagctgcgccaggtccttgagtcccggctgcagcggcccctgcctgaggacctggccgaggctctggccagtggggtcatcctgtgccagctggccaaccagctacggccgcgctccgtgcccttcatccatgtgccctcccctgctgtgccaaaactcagtgccctcaaggctcggaagaatgtggagagttttctagaagcctgtcgaaaaatgggggtgcctgaggctgacctgtgctcgccctcggatctcctccagggcactgcccgggggctgcggaccgcgctggaggccgtgaagcgggtggggggcaaggccctaccgcccctctggcccccctctggtctgggcggcttcgtcgtcttctacgtggtcctcatgctgctgctctatgtcacctacactcggctcctgggttcctaggccccaaaatcggccctccctcacccctttcccttcctctctatttataaggtccctgctccacccgaccccacctgcggtgccttcagccccaaccaaagacactagtgcacccccttcacagacactgacctcagaggccccactctggtgcccccagaccctgggcccccagcctctggcctccctccagtagccccacgagtccccacctctcagtgctgacggtgccttcatgtccccgccggccctgcccctgccctctgtaccccgtgaggggtggcaggagctggagtctcccccttcctcctgtgccctccccttccccccccaacagctgctatgggggggctaaattatctctattttgtagagaggatctatatttgtaggggttcggggcccaggccgggtccctatctctgtgtataaactgtacagaccgtggccgccctgcctgtgtgtgtgtgtgtgcgcgcgcgcgcgcgtctgctccgcgtgttggtggctgtggccatggctctgtgcccaccagcatctccctcctgagatgccggcctctcatgctcccggagcgtccgccaaccccccgtgtcacctcccttctgttatcgctgacagctttcttgcgtctcatttgtcgccgagccccgagcgcacggtgatgctcgggtctgcccccgaccccctgccacaggccggaagccgcagggggcaccgtggggaagctaacccggccccttcccccaggagtcactgtgccagccccaccacatcctggaagaggagggggccccgggaaggggcctcccctacatcgctgctgtcgtccacgccctgctggaccggccttaggggtgaaggtgggggcacagggcccaccccgcccgggaccccgggagcagaagacgcgcctgggctccgcgctctcagagaagcacgtggtgagggtggcctgggcctgggcacccttggcctgccggcctggctgcctctggggtcgagggtctgggtggaaggaccgcgggtgtcgcaggtgtcgtgtcagccgcaataaacagaagccagaagccctctgggtggccctcaggtgtaa

SEQ ID NO: 29 - DNA, 1853 bp, Homo sapiens
cgctccacctctcaagcagccagcgcctgcctgaatctgttctgccccctccccacccatttcaccaccaccatgacaccgggcacccagtctcctttcttcctgctgctgctcctcacagtgcttacagctaccacagcccctaaacccgcaacagttgttacgggttctggtcatgcaagctctaccccaggtggagaaaaggagacttcggctacccagagaagttcagtgcccagctctactgagaagaatgctgtgagtatgaccagcagcgtactctccagccacagccccggttcaggctcctccaccactcagggacaggatgtcactctggccccggccacggaaccagcttcaggttcagctgccacctggggacaggatgtcacctcggtcccagtcaccaggccagccctgggctccaccaccccgccagcccacgatgtcacctcagccccggacaacaagccagccccgggctccaccgcccccccagcccacggtgtcacctcggccccggacaccaggccggccccgggctccaccgcccccccagcccatggtgtcacctcggccccggacaacaggcccgccttgggctccaccgcccctccagtccacaatgtcacctcggcctcaggctctgcatcaggctcagcttctactctggtgcacaacggcacctctgccagggctaccacaaccccagccagcaagagcactccattctcaattcccagccaccactctgatactcctaccacccttgccagccatagcaccaagactgatgccagtagcactcaccatagcacggtacctcctctcacctcctccaatcacagcacttctccccagttgtctactggggtctctttctttttcctgtcttttcacatttcaaacctccagtttaattcctctctggaagatcccagcaccgactactaccaagagctgcagagagacatttctgaaatgtttttgcagatttataaacaagggggttttctgggcctctccaatattaagttcaggccaggatctgtggtggtacaattgactctggccttccgagaaggtaccatcaatgtccacgacgtggagacacagttcaatcagtataaaacggaagcagcctctcgatataacctgacgatctcagacgtcagcgtgagtgatgtgccatttcctttctctgcccagtctggggctggggtgccaggctggggcatcgcgctgctggtgctggtctgtgttctggttgcgctggccattgtctatctcattgccttggctgtctgtcagtgccgccgaaagaactacgggcagctggacatctttccagcccgggatacctaccatcctatgagcgagtaccccacctaccacacccatgggcgctatgtgccccctagcagtaccgatcgtagcccctatgagaaggtttctgcaggtaatggtggcagcagcctctcttacacaaacccagcagtggcagccacttctgccaacttgtaggggcacgtcgcccgctgagctgagtggccagccagtgccattccactccactcaggttcttcagggccagagcccctgcaccctgtttgggctggtgagctgggagttcaggtgggctgctcacagcctccttcagaggccccaccaatttctcggacacttctcagtgtgtggaagctcatgtgggcccctgagggctcatgcctgggaagtgttgtggtgggggctcccaggaggactggcccagagagccctgagatagcggggatcctgaactggactgaataaaacgtggtctcccactgcgccaaaaaaaaaaaaaaaaa

SEQ ID NO: 30 - DNA, 5403 bp, Homo sapiens
tccgggttactgagcgctcggggccttttcaaatcgggatccgttaccgcttccccggcagccgccattgtcgcgctcggagcccctcagctcaggcggccgaggcggaggcagcggcggcgggatggcggacgccaacaaggccgaggtgcccggggccactggtggcgacagcccgcacctgcagcccgcagagccgccgggcgagccgcggcgagagccgcaccccgcggaggcggagaagcagcagccgcagcacagcagcagctccaatggcgttaaaatggagaatgatgaatcagcaaaagaagagaaatctgacttaaaggaaaaatctacaggaagtaagaaggccaatagatttcatccttattcaaaagacaagaattcgggcactggagaaaagaagggtccaaatcgtaacagagttttcattagcaacatcccatatgacatgaaatggcaagctattaaagatctaatgagagagaaagttggtgaggttacatacgtggagctctttaaggatgcggaaggaaaatcaaggggttgtggtgtggttgaattcaaagatgaagaatttgtaaagaaagccctagaaactatgaacaaatatgatcttagtggaagaccccttaatattaaagaggatcctgatggagaaaatgctcgtagggcattgcagcgaacaggaggatcatttccaggaggacacgtccctgatatgggatcagggttgatgaatttaccaccttccatactcaataatccaaacattcctcctgaagtcatcagtaatttgcaggccggtagacttggttccacaatttttgttgccaatcttgacttcaaagttggttggaagaagctaaaggaagtgttcagcatagctggaactgtgaagcgggcagatattaaagaagacaaagatggcaagagcagaggaatgggcactgtcacttttgagcaagcaattgaagcagttcaagcaatttctatgttcaatgggcagtttttatttgatagacctatgcatgtgaaaatggatgacaagtctgttcctcatgaagagtaccgttcacatgatggtaaaacaccacaattaccacgtggtcttggaggcattgggatgggacttggtccgggtggacagcctattagtgccagccagttgaacataggtggagtaatgggaaatttaggtccaggtggtatgggaatggatggtccaggttttggaggaatgaatagaattggaggaggaatagggtttggtggtctggaagcaatgaatagcatgggaggatttggaggagttggccgaatgggagagctgtaccgtggtgcgatgactagtagcatggagcgagattttggacgtggtgatattggaataaatcgaggctttggagattcctttggtagacttggcagtgcaatgattggagggtttgcaggaagaataggatcttctaacatgggtccagtaggatctggaataagtggtggaatgggtagcatgaacagtgtgactggaggaatggggatgggactggaccggatgagttccagctttgatagaatgggaccaggtataggagctatactggaaaggagcatcgatatggatcgaggatttttatcgggtccaatgggaagcggaatgagagagagaataggctccaaaggcaaccagatatttgtcagaaatctaccttttgacttgacttggcagaaactaaaagagaaattcagtcagtgtggtcatgtaatgtttgcagaaataaaaatggagaatggaaagtcaaaaggctgtggaacagtcagatttgactccccagaatcagctgaaaaagcctgcagaataatgaatggcataaaaatcagtggcagagaaattgatgttcgcttggatcgtaatgcataatttcaagccatggttggaacattcctacatctgttttgctgaatctcctagtaaaagtcatttttttaaagtaatattgtatgcttacaaaagctgtaaaaatgaacttttaaaactcccaccagcttttaacagtataatgttaaaaatatactgtaatttttgttaatctcaagtttgggtttttaaagacagcaagtctggtcattcagtttaaatgaatggttatactgtttttaatgaaataagccattttcttgttgttttcagtactacatagttggatttgtttgttctagtttctccagtttttgtcaacttattgtatggtaaaacatagattttttccccccaaacttctgttttataatatgtaatttttcatgaaaagaaagggctcagaaaaattaggatgtgattttggttggttttaaattactgtaagttttagattctaaggttcaagatttttaaaatttgatttaaatgaagaaatggatttttctctctgcccctccctgccattcatattttctgcataacactattaataatatcaacctccacagccccttattttattatttccaataattccaagttcatatagaactgataatgtagcaagccccaagtatgataataggcagactattcccaactttctgtctagtttccagccattgaagtgaactgctaaaaaaagaaaaataattgaaatgttgagagagatggttatgtaagttagtcctctgctgtttacttctgcaggagctgatccatttataaatgcagttttaataaaccatggaataccaaggcacaacatatcaaacacattggatcccacgatgttagacatagccatatctcctttccctacaaaagaaaagcatactgttaaaatgtgcttaccaatactgtgttttattaataatcttcataagaaaagaaacactggatacttttttgttgttgattcgttttgaaaaattgttgttagagcaaaagtcttactgaatttgtatttttaaatttttcttgggttagtatttaaagtcttaacatttatttaataattatatttattaaaccatttttcaataaggtatatagcttatttgttgcttttcattgtaatttaacatggttaatggttaattactatttaacacacatttcaaatgaatattatttgggggattagattgagtgaaattaacctgctattaaatagtaaacttttcctctggagtcacttttttcccccttcaaagtatgttactgaggaagtaaacttttttttttttttttggtttttgttttttgagacacagtctcgctctgttgcccaggctgctggagtgccgtggcgcaatctcggctcactgcaacctccgcctcctggattcaaacaattctcctgcctcagcctcctgagtagctgggattacaggcacatgccaccacgcccggctaatttttgtatttttagtagagactgggtttcaccatgttggtcaggctggtctcaaactcctgacctcgtgatccacccgcctcggcctcccaaaatcctgggattacaggcgcgagccaccacacccggctggaagtaaacatttttaaagctacttttactcattctagccttgtagaatgaccattgcagcttgagggacctagttcttaccttttcttgcaaccaacacacttgcaattgtgtctggtatgcttgttcctgctgctaataaagtaaggcccattactgtatcgggaatttctagtgtttcccctgtaataaacagatatttcaagttacaaatcttaaagattcactaaccatcctttgcagttattttggatatttccttcgtgaacaaaaataaaataggcacatttagaattcagagccaatatgtgcttgcttattagttttttagctagcaacatatttgaatcaggctggtaattcgggtaacccaggtagcacagatttttaatgacatatctaaagatacgtaacagctaaaattctgccagtgagaaattttcctgtttgatattcttacaaaagatgtttatgtccaccattatctcatcagggctgtgctgaatatttgataatgagactgatcattccgctttttctttcttaaaaatattagtcagagttaagcaaattaattatagctatctttaagctataaatgtgttaacatgtatatataccatttattatgttctactttagtgatataccttaatttagtgggctttggcagggcgggggagggggaacgttcattaatctctgaggaaaacaaaacctgttttctacttgagtctaacatatggtcccaatttattaatacttctgttaaatttgatgtcaggtcaacatttttcagaaatgtatttattctcagaaacagaaccagagagaagttaaacaaaaggttatgtaactgttcctttaatgttgtaattgaaaacttggtttagcgtcttttttttctttctctttttttttcttaaaatgccaactaaaataattagaaagtagcttatttattgcatgcttatacattgatattggaattggaattggttgttaatttctgttactggctttgctagaattcatatgtgcataaataacactaatatttatcatcttgggggctgttctgtgatctattacatgatttttgctctctttttatttttctagtatcaaatgtgttctggctgagtgaatttggatagatataatatgcaagctaattggactttttcatttttctcattaaaaaaaggaagaagtagtccactttttgctagcatactattctgagacttacattaatttgggaaaagtcaagggtcaacaaatttttgtgtctgtgaggggccagatagtaattatttaggctttgcaggctgtgtgatttctgttgcagttattcagctttgccaatgtagtgtgaaaacaatcatagataatatgtaaaaccttactaataaaaacaagctgggttatgttggcacacaggcagtagtttgttcacctctgctgtaagttaatttgggttaacctttgtaggagaaattacagattatttttgtctttgttcatagtttttttgtttagggactgtagtggattatggccaagcagcagtagctagttaagtcttaatcatgaaggtagtagaaacctagaataaaattattatgcccttttcactcatttcataatatgtttgtattgccgtgttgaaaagccaaataaaatacaatccagttaagcagtgagcacccattgttttcccaaaaatagagctccttgctttgtttttgtttttttgttcttttttttttttattatggaatggaattcaatataaagagtttattgtggaccccatggaatgtgattaaattattagcataataaaaagacatcctatgaa

SEQ ID NO: 31 - DNA, 4959 bp, Homo sapiens
agtgggagacgtgcgctgagaggcgggggctgcgctcggcggaacagcagccctcgggcggagagcggggccggggtccgagagcaggtgatgccaagagctgagcgggactcgtgagcgcgcggttcagcacctaccagggcgtcccgtaaaaaacctcgccttcgcctgtctctgggaaccatagcgccgcaggtgccgcctgtcctcgccttcctgctgcaatcgccccaccatggactccccgatccagatcttccgcggggagccgggccctacctgcgccccgagcgcctgcctgccccccaacagcagcgcctggtttcccggctgggccgagcccgacagcaacggcagcgccggctcggaggacgcgcagctggagcccgcgcacatctccccggccatcccggtcatcatcacggcggtctactccgtagtgttcgtcgtgggcttggtgggcaactcgctggtcatgttcgtgatcatccgatacacaaagatgaagacagcaaccaacatttacatatttaacctggctttggcagatgctttagttactacaaccatgccctttcagagtacggtctacttgatgaattcctggccttttggggatgtgctgtgcaagatagtaatttccattgattactacaacatgttcaccagcatcttcaccttgaccatgatgagcgtggaccgctacattgccgtgtgccaccccgtgaaggctttggacttccgcacacccttgaaggcaaagatcatcaatatctgcatctggctgctgtcgtcatctgttggcatctctgcaatagtccttggaggcaccaaagtcagggaagacgtcgatgtcattgagtgctccttgcagttcccagatgatgactactcctggtgggacctcttcatgaagatctgcgtcttcatctttgccttcgtgatccctgtcctcatcatcatcgtctgctacaccctgatgatcctgcgtctcaagagcgtccggctcctttctggctcccgagagaaagatcgcaacctgcgtaggatcaccagactggtcctggtggtggtggcagtcttcgtcgtctgctggactcccattcacatattcatcctggtggaggctctggggagcacctcccacagcacagctgctctctccagctattacttctgcatcgccttaggctataccaacagtagcctgaatcccattctctacgcctttcttgatgaaaacttcaagcggtgtttccgggacttctgctttccactgaagatgaggatggagcggcagagcactagcagagtccgaaatacagttcaggatcctgcttacctgagggacatcgatgggatgaataaaccagtatgactagtcgtggagatgtcttcgtacagttcttcgggaagagaggagttcaatgatctaggtttaactcagatcactactgcagtctgacatgaaaagatagaatttaaaataaacttttagagatctcatggtctgaagtcatcagatgcagaccacgttcgtgatcagtggaaacatcaaggacaaaaggtccacgcaacacatgcacctcttctctagggcacagaagcgaggcagagcctcagttcctctgatgaacaagggaacaggtcttttccttctggtttgctaggtaaggttcagcacccatctgctgtggccttcctatgaaacgtagtttcaaaagctcggtttaagaaaaaaggaaaagaaaaaacattgctttcagagctcaatgggcatccaatccagatgtttcacaatgacagcaacaacctccaacggaatgggaactatttccagggttcatgcccagctcactgtatgctgtgtggacatgcatttcatgtggctgtgtggtaagaattacagcttacatatggcttggacccacatctgaggaatctgatgttcacttataccagaacattatcttgctatttatgaaattatttaaacgttcaaaagattgtttttaacatggtttaatttcccaaaaactacagttttttttcttagcatgctattcaggtaaacagtcttataataaagcatgtcccattgtcaagaaacataaagtggtgtgaataccactgaaaatatatatatagtatcttctgtaaataatagtacctgtgtgaataaggaataggcttgcctcccagccaggcaatttcctgagggcacactaatgatatcccctgagttgctaagttgatgctgagacattttgctgggaattagtcatggcatgatctctttcagactccctgaataccatttagtcccgtaacagtgctcacaactcatgtgctaatgaatcacaaaggctttaactagctcccaggttgtagccttcgcaggatctagtttatttgccacatctctttatgaacatatagcgattcgcagatctctctattcacggagaggaaggtgttttgcttctgtagatctcaaggtactattttgtggctctcagcaggaagtagaattgttcctaaatgtgtgctgaatgaggacatgatgtccctcctggtgccaggacacatcctgcatggcattctgtgaagggcatacctgctgaggataatgccaggagcagcacatttagggtaattttgctaaaacttccagatgacatataaattccctctttttccccctgaaacttaccatttcagaggtaatggctttttctgtaatttgcctgagaagaaaaaagggataatttagaaataacactccaagcctatatattactagggctgcatcctctggaatttaatagaaaaattgaatatatagccctatgtaactacagacatcattacaactgttaagttctgttcaccatgcaagttctcggtggtgtatgtactctcaccttttggaaacaaaaccttgcattgaaggttttacacatggcttcagaatgttactctgaccatgtttgcctctactccagattatcatggcacctaacacagatgacatatggcagaatggaagtgatttctcctaatgaaaatgaagtgctcttttgagtatttcttgttttattgagattcctatctgcccttgtatttttataactgaatgtaaataggaattgcttaaatactggtttacactaatcccatagttaaaaatcttggctatggtacaggaaggatatctatatagaggatagttccagaaacaagccctggtgaaataggaaatataaaaacttctttatggaacaggaaaacccaagagactttctcgtcagattcctttccagtgcaaagtataacagagataggattatgagatgaaatcacagtagtgtgtttcctttaattttttctgtcttctttttttttttttttttttttgagacggagtctcgctctgttgcccaggctggagtgcggtagcacagtcttggctcactgcaacctccacctcctgggttcaagcgattctcctgcctctgcctcctaagtagctgggattacaggcgtgcaccgccaagcccggctaatttttgtatttttagtagagacggggtttcaccatgttatgcaggctggtctcaaactcctgacctcagaatattcacctgcctcggcctcccaaagtgctgggattacagatgtgaatggccacgcctggcctgtttcctttaagttagcacttcacgtgctcttacagcgttaattgccattattggtttgcctgattttcctgcatctcctcatatgtaagtctgcagcccaaggagagaatagtagctgtatgtgcccacaaggggtgtccaagcttcttgattcttgttaatatcgactccccaacattgaaaaaggagtgaagaagggaatatcattttagggtactgctttaaaggaatgataaagtaaacaacgtagcagggaaaataccacttgcacaaatgtatttctttgtcaaagtgtgtacacgctttctgtttgtcctgatgtcctgctgtgaagcagggaccacattgccatttattcattgttccaggcaatgcatttgtccaaacccctctggctctctgatatctctcatttcttgatgttcctattctctgacctcaacaaggaggacactgtctgttgtgtctctttgagactagaactccatgtgtttaaccttcagatccattctctacatgaaccctattctttccaccctggtaagaaggtctggaagacaggtcctaacgaggggtcagagaaggcacagagaaatgaaccagccatgcaggggcagcactgaggaggaaaccccccactctaactgggaggagagtggaaacactcttagtatctcagagtagttaccaatctaagagcatccttcgagtttaagtcaaaactctaggcttaataccaaaaataatacatcatttggaaaaatagcttggagaaaaaaaatcaataaagagtcacataaaatcttaagaaaatggttctattctgtgatatattactaagaaatacagttcttaaacgtgtataactattgtcagacaatttataggtgtttcatctagtcctgggatgaaatacgatgactcatgcaaattcagggagcacactggctgactttaaattggaacattgtaaagtgaaagctgtgaaaggttgtgtgtcctatcaatgagatttattttctaaccaagagctgttcggatgattcagtataaatacgaaaatcacatccaaaaacggtataacccagcttccttaaggcaattttcttctctgaaacaagaatatactcatatgttctttactataatgtatatgatttttatcttgtactttaaaagatgataattatgcattgtatatacgattgtgtgccttgcaataaaatcaaaactgtacctgctgaaaatcacaacagtc

SEQ ID NO: 32 - DNA, 2190 bp, Homo sapiens
agtcgcgaccttttgtcttctcttacagcgcacccgttggtgcgcgggaataggtgtgcatgccccggcctgggcctttttctgttgacccacggcatcaccttagcaagggtgttgtccttttcagtccattccctgaagcgcagaaccggaggccttgtgagaacctggctttttgtccagtcctgtcctcagaactcaaggaggcatcacggggggagtcatttacctccctggtctcaggtgtctctcacagtacactcctgatcatgtagttggacctggagcagacattgatcccactcaaataacctttcccggatgcatttgtgtcaaaactccctgcctccctggcacttgctcctgtctccgccatggagagaactatgatgataactcatgccttagagatataggatctggaggaaagtatgcagagcctgtttttgaatgcaatgtcctgtgccgatgcagtgaccactgcagaaacagagtggtccagaaaggtctacagttccacttccaagtgttcaagacgcataaaaaaggctggggacttcgtaccttggaatttataccgaaaggaaggtttgtctgtgaatatgctggtgaggttttaggattctctgaagttcagagaagaattcacttacaaacaaaatccgactccaattacattatagccatcagggaacatgtttataatgggcaggtaatggaaacatttgttgaccctacttatataggaaatattggaagattccttaatcattcttgtgagccaaaccttttgatgattcctgtccgaattgactcaatggtacctaagttggcactttttgcagccaaagatattgtgccagaagaagaactctcttatgattattcaggaagatatcttaatctaacagtcagtgaagacaaagaaaggctagatcatgggaaactaaggaaaccttgttactgtggtgccaaatcatgtactgctttcctgccttttgacagttctctgtactgccccgtagaaaagtcgaacatcagttgtggaaatgagaaggaacccagcatgtgtggctcagccccttctgtgttcccctcctgcaagcgattgacccttgagactatgaaaatgatgttagacaaaaagcaaattcgagcaattttcttattcgagttcaaaatgggtcgtaaagcagcagaaacaactcgcaacatcaacaatgcatttggcccaggaactgctaacgaacgtacagtgcagtggtggttcaagaagttttgcaaaggagatgagagccttgaagatgaggagcgtagtggccggccatcagaagttgacaacgaccagttgagagcaatcatcgaagctgatccccttacaactacacgagaagttgctgaagaactcaatgtcaaccattctacggtcgttcgacatttgaagcaaattggaaaggtgaaaaagctcgataagtgggtgcctcatgagctgactgaaaatcaaaaaaatcgtcgttttgaagtgtcatcttctcttattctacgcaaccacaacgaaccatttctcgatcggattgtgacgtgtgatgaaaagtggattttatatgacaaccggcgacgatcagctcagtggttggatcaagaagaagctccaaagcacttcccaaagccaatcttgcacccaaaaaaggtcatggtcactatttggtggtctgctgctggtctgatccactacagctttctgaatcccggtgaaaccattacatctgagaagtatgctcaggaaatcgatgagatgaaccaaaaactgcaacgcctgcagctggcattggtcaacagaaagggcccaattcttctccacgacaatgcccgaccgcatgttgcacaacccacacttcaaaagttgaatgaattgggctatgaagttttgcctcatccaccgtattcacctgacctcttgccaaccaactaccacgtctttaagcatctcaacaactttttgcagggaaaacgcttccacaaccagcaggatgcagaaaatgctttccaagagttcgtcgaatcccaaagcacggatttttacgctacaggaataaaccaacttatttctcgttggcaaaaatgtgttgattgtaatggttcctattttgattaataaaaatgcgttgagcctaaaaaaaaaaaaaaaaa

SEQ ID NO: 33 - DNA, 2296 bp, Homo sapiens
gggacccagggactgggaggccggttggggctgggctcaggggccgagacctagctgggcttggggcggggccgagacggagcgaggggtccagggtgtgggaaacggggaggggtttgaggaggggatcggaatgtggctcaagttcgggaggcgttacctgcggagggtttgaggcaggcccaagagcgagcccatggtcttccgacgcggggccaggggcgggccccaggatccggagcttcgtgcggggccgagtccaggtttggggcccgggaggcggggccagttagggcgactgtccctgggatcgtcgggtcaggccttgggctaacgtaggcactctcgcagttcctccgccttcaggaaggtcttttcagcaggggccttacgggtgcatgcttcggtcctggaggccttatcctagcctcctctccatcagcgccacccgtctggggcccgaaaggagggagctttccctctgtcccccagcctttggactgtcaccaaacaagccattcgttcatcaaatactttttaagcgcctaccatgtgcctgacaagggagatgtaacggtgagaaaaactaggtgtggtccaggcccttcaggggctcaggtgctcgtggaagaagtggacattgaagtacttatcacacaaatgaggataaaagtacgatagcgatatctaccacgaagctgttgttccccaccagaaccaaatgagcgcaagatctgacaaagaaaaaaaaaggttcatcttttattcctccaaacactttcatttaaatcaagaggatgggatgtggttattgctgtgtttttagacagaatcaacggtttctgggtctgagatgttgcatacaccttctcagtccctgtatcctgagatggagtcacctgagaatccacagcaagtcctaaccagggatgggtctgggtgattaaggaaggttggcttcagaactgggccaggggcactgctttgcttttgctgttttgatcagctctctgcctgaaggagacaagaaaaaccaacgggaacagctggggaaactgagttacagagcttgtctgcactgagtcatcaggagcaaatgctagatcagatagggtctctctctctgccacccaggccagagtgcagttgacgcagggcaggggagccccgaagtggagcatagtgtgtccggaactggtgggttcttggtctcactgacttcaagaaagaagccgcggaccctcgcgaaactcctggagggcagaggcatgcctgccatcttcatcattgcattaccaccacccaacactatcgggggacctgccctgataatcagtctacaggtgtatccagcagctccagagagacagcgaccagcgagaaggggccatgatgatggaggtggttttgtcaaaacgaaaatggggatatgtagggaaaagaaagagagatcagactgttactgtgtctacatagaaagggaagacataagagactccattttgaaaaagacctgtactttaaacaattgctttgctgagatgttgttaatctgtagctttgccccagccactttgccccaaccactttgacccaatctggagctcataaaaacatgtgttgtatgaaatcaaggtttaaggcatgtagggctgtgcaggacgtgccttgttaaccaaatgtttgcaagcagtatacttggtaaaagtcatcaccattctctcatctcaataaaccaggggcacaatgcactgtggaaagccgcagggacctctgcccttgaaagctgggtattgtccaaagttcctccccatgtgatagtctgaaatatggcctcgtgggatgagaaagacctgacggtcccccagcgcgacacccataaaagatctgtgctgaggtggattagtcaaagaggaaagacttgcagttgagatagaggaaggccactgtctcctgactgcccctgggaactgaatgtctcggtataaaacacgattgtacatttgttcagttctgagatgggagaaaaaccgccctatggtgggaggcgagacatgtttacagcaatgctgccttgttatcctttactccactgagatgtctgggtggagagaaacataaatctggcttacatgcacgtccagtcatagtaccttcccttgaacttcattatgacatggattctattgctcacgtttgttgctgaccttctccttattatcaccctgccctcctactacattcctttttgctgaaataatgaagataataatcaataaaaactgagggaattcag

SEQ ID NO: 34 - DNA, 894 bp, Homo sapiens
gcccgtcttcgtgtctcctccctccctcgccttcctccttcctagctcctctcctccagggccagactgagcccaggttgatttcaggcggacaccaatagactccacagcagctccaggagcccagacaccggcggccagaagcaaggctaggagctgctgcagccatgtcggccctcagcctcctcattctgggcctgctcacggcagtgccacctgccagctgtcagcaaggcctggggaaccttcagccctggatgcagggccttatcgcggtggccgtgttcctggtcctcgttgcaatcgcctttgcagtcaaccacttctggtgccaggaggagccggagcctgcacacatgatcctgaccgtcggaaacaaggcagatggagtcctggtgggaacagatggaaggtactcttcgatggcggccagtttcaggtccagtgagcatgagaatgcctatgagaatgtgcccgaggaggaaggcaaggtccgcagcaccccgatgtaaccttctctgtggctccaaccccaagactcccaggcacatgggatggatgtccagtgctaccacccaagccccctccttctttgtgtggaatctgcaatagtgggctgactccctccagccccatgccggccctacccgcccttgaagtatagccagccaaggttggagctcagaccgtgtctaggttggggctcggctgtggccctggggtctcctgctcagctcagaagagccttctggagaggacagtcagctgagcacctcccatcctgctcacacgtccttccccataactatggaaatggccctaatttctgtgaaataaagactttttgtatttctggggctgaggctcagcaacagcccctcaggcttccagtga

SEQ ID NO: 35 - DNA, 2034 bp, Homo sapiens
atcagttctcgcccgtctgggcgtgggcgtggccggcgtggctgctcgggaccacccgaacccgcggccatggccccggccgccgccagccccccggaggtgatccgcgcggcgcagaaggacgagtactaccgcggtgggctgcggagcgcggcgggcggcgccctgcacagcctggcgggtgcgaggaagtggctggagtggaggaaggaggttgagctgctctcagatgtggcctactttggcctcaccacacttgcaggctaccagaccctgggggaggagtacgtcagcatcatccaggtggacccatcgcggatacatgtgccctcctcgctgcgccgtggcgtgctggtgacactgcatgccgtcctgccctacctgctggacaaggccctgctccccctggagcaggagctgcaggctgaccccgacagtgggcgacccttgcaggggagcctggggccaggtgggcgtggctgctcaggggcgcggcgctggatgcgtcaccacacggccaccctgactgagcagcagaggagggcgctgctgcgggcggtcttcgtcctcagacagggcctcgcctgcctccagcggctacatgttgcctggttttacatccacggtgtcttctaccacctggccaagaggctcacggggatcacgtacctccgtgtccgcagcctgcccggagaggacctgagggcccgtgttagctacaggctgctgggggtcatctcactgctgcacctggtgctgtccatggggctgcagctgtacggtttcaggcagcggcagcgagccaggaaggagtggaggctgcaccgcggcctgtctcaccgcagggcctccttggaggagagagccgtttccagaaaccccctgtgcaccctgtgcctggaggagcgcaggcacccaacagccacgccctgcggccacctgttctgctgggagtgcatcaccgcgtggtgcagcagcaaggcggagtgtcccctctgccgggagaagttccctccccagaagctcatctaccttcggcactaccgctgagccggcgcccgggtgggcctggacacagatgacctctacgggagtctgaacgccaagatttagtctcaggattaaccttgcttgcacagaagttagaacactctcagttttttgtcatgtaagatactaacctagccaccctgggagagaacagaaagctgtccctggctgcgctttctcagccctgggaggggcgcctgaacccagaacatttccctaaccccaacctggtaggactcagccacttcttcaggaatttcacttatttggacgggattttaggtttccctcccttccccaaaccatacagttgagaagtaattcagaagtaggccagaagacactttattcgtttatattgtgagaaaacagccccatcaggcttgtgttaaggcaatggactgaatgagtgcgtgctgggtggggtggggcacggaggctggcgggttgcttcagccagtgcagtgagaacagcagccccacggccccatgggaggcggcgctgctctccccgagggcggctgggcagagcacatcccccaggacttgatgaccacacggggcagagagaaaccaaccaaggccagcacctccgtcggaagcatttggcacacacaccttcaatacacgtcaaggtcgcttccagttttagaaaacagaaatctgcatctcagcctgagacgcacagagaggtctcttcctgacccagacgcactcacgagccaggtcctgggggtatgggggctgccaggggcgcccgagccctctcctggggggcctgctgggcaggcgacctgctgacccacggtcactgctgtgttcagcccctcagctcggccccagcctatttcccgcctccatttgatgtttccaggttttcaaaactgcatttaacctgcgccagagagttcaccgtaggcatctttaataaactaactccagcaaaatgtgggtacgttactaaaaaaaaaaaaaaaaaaaaaa

SEQ ID NO: 36 - DNA, 3401 bp, Homo sapiens
gcggggacggcgacgcggcgcaggcggcgggagtgcgagctgggcccgtgtttcggccgccgccatggccgcggtggacctggagaagctgcgggcgtcgggcgcgggcaaggccatcggcgtcctgaccagcggcggcgacgcgcaaggtcccctgacaagcccaccaggccccctgctgagatggctgtgaccctgggctgacccgcccagtggcacattgactccgcctggagctggggagaccagagaggccctgtggttggacggtggcctgggtgcgctgctcctgccctctccttgccctgcctcagctgctgcctgccagaggcgtggcacctcacctcacacctgctccctgctgctgagccccacgccaagctggagagcggatgagaagcatgtgtaaccagggtagaggtcgagagtcctctcgtgggggtctccatgttcaagggagctgccgaggcttgagcaggagcccccagcaggaaactggctttgccaaggcccccgctgggacagactgtttctttcactgcagtcctgggagccgagggcaaggggacaggaaagaggaagtgacctcagagcctggtggcaccagcatcatgtccaggctggggggcatgaacgctgctgtccgggctgtgacgcgcatgggcatttatgtgggtgccaaagtcttcctcatctacgagggctatgagggcctcgtggagggaggtgagaacatcaagcaggccaactggctgagcgtctccaacatcatccagctgggcggcactatcattggcagcgctcgctgcaaggcctttaccaccagggaggggcgccgggcagcggcctacaacctggtccagcacggcatcaccaacctgtgcgtcatcggcggggatggcagcctcacaggtgccaacatcttccgcagcgagtggggcagcctgctggaggagctggtggcggaaggtaagatctcagagactacagcccggacctactcgcacctgaacatcgcgggcctagtgggctccatcgataacgacttctgcggcaccgacatgaccatcggcacggactcggccctccaccgcatcatggaggtcatcgatgccatcaccaccactgcccagagccaccagaggaccttcgtgctggaagtgatgggccggcactgcgggtacctggcgctggtatctgcactggcctcaggggccgactggctgttcatccccgaggctccacccgaggacggctgggagaacttcatgtgtgagaggctgggtgagactcggagccgtgggtcccgactgaacatcatcatcatcgctgagggtgccattgaccgcaacgggaagcccatctcgtccagctacgtgaaggacctggtggttcagaggctgggcttcgacacccgtgtaactgtgctgggccacgtgcagcggggagggacgccctctgccttcgaccggatcctgagcagcaagatgggcatggaggcggtgatggcgctgctggaagccacgcctgacacgccggcctgcgtggtcaccctctcggggaaccagtcagtgcggctgcccctcatggagtgcgtgcagatgaccaaggaagtgcagaaagccatggatgacaagaggtttgacgaggccacccagctccgtggtgggagcttcgagaacaactggaacatttacaagctcctcgcccaccagaagccccccaaggagaagtctaacttctccctggccatcctgaatgtgggggccccggcggctggcatgaatgcggccgtgcgctcggcggtgcggaccggcatctcccatggacacacagtatacgtggtgcacgatggcttcgaaggcctagccaagggtcaggtgcaagaagtaggctggcacgacgtggccggctggttggggcgtggtggctccatgctggggaccaagaggaccctgcccaagggccagctggagtccattgtggagaacatccgcatctatggtattcacgccctgctggtggtcggtgggtttgaggcctatgaaggggtgctgcagctggtggaggctcgcgggcgctacgaggagctctgcatcgtcatgtgtgtcatcccagccaccatcagcaacaacgtccctggcaccgacttcagcctgggctccgacactgctgtaaatgccgccatggagagctgtgaccgcatcaaacagtctgcctcggggaccaagcgccgtgtgttcatcgtggagaccatggggggttactgtggctacctggccaccgtgactggcattgctgtgggggccgacgccgcctacgtcttcgaggaccctttcaacatccacgacttaaaggtcaacgtggagcacatgacggagaagatgaagacagacattcagaggggcctggtgctgcggaacgagaagtgccatgactactacaccacggagttcctgtacaacctgtactcatcagagggcaagggcgtcttcgactgcaggaccaatgtcctgggccacctgcagcagggtggcgctccaaccccctttgaccggaactatgggaccaagctgggggtgaaggccatgctgtggttgtcggagaagctgcgcgaggtttaccgcaagggacgggtgttcgccaatgccccagactcggcctgcgtgatcggcctgaagaagaaggcggtggccttcagccccgtcactgagctcaagaaagacactgatttcgagcaccgcatgccacgggagcagtggtggctgagcctgcggctcatgctgaagatgctggcacaataccgcatcagtatggccgcctacgtgtcaggggagctggagcacgtgacccgccgcaccctgagcatggacaagggcttctgaggccagccatgcccacgcccctccccagcccccacccatgccagcgcagcgccagggctcagatggggcctgggctgttgtgtctggagcctgcaggcaggtgggggctgcgtccctgctcagcccatcccctgcctctatccctggccacctgccaggcctccctcgggctggtgtcttgagaccagcctgccaggccctccagcaggaggacagagtgccctggggcatccaccttcctgcccaggggacgtggcgctgtcggtgtttggaggctgctgccccctggctttggcgccccatgggccctcagcgtctccccatgctgggctcactacatgggccagcccttgctctacctggccggtaggctgctggcgcctaggttgtgttgagagggggatgcccctggccctgcctcactgtgacctgctcctgcccacgtgcagcacctgtcaccttttctagaaataaaatcaccctgactgtggggtgcatcggtctccggagagcaca

SEQ ID NO: 37 - DNA, 2657 bp, Homo sapiens
gagtcaggcgcgcgcgggcagggtccccattgcctgctgcgcacccggacgtgcggctcccctcggcctcctcgccatggacgcggacgactcccgggcccccaagggctccttgcggaagttcctggagcacctctccggggccggcaaggccatcggcgtgctgaccagcggcggggatgctcaaggtatgaacgctgccgtccgtgccgtggtgcgcatgggtatctacgtgggggccaaggtgtacttcatctacgagggctaccagggcatggtggacggaggctcaaacatcgcagaggccgactgggagagtgtctccagcatcctgcaagtgggcgggacgatcattggcagtgcgcggtgccaggccttccgcacgcgggaaggccgcctgaaggctgcttgcaacctgctgcagcgcggcatcaccaacctgtgtgtgatcggcggggacgggagcctcaccggggccaacctcttccggaaggagtggagtgggctgctggaggagctggccaggaacggccagatcgataaggaggccgtgcagaagtacgcctacctcaacgtggtgggcatggtgggctccatcgacaatgatttctgcggcaccgacatgaccatcggcacggactccgccctgcacaggatcatcgaggtcgtcgacgccatcatgaccacggcccagagccaccagaggaccttcgttctggaggtgatgggacgacactgtgggtacctggccctggtgagtgccttggcctgcggtgcggactgggtgttccttccagaatctccaccagaggaaggctgggaggagcagatgtgtgtcaaactctcggagaaccgtgcccggaaaaaaaggctgaatattattattgtggctgaaggagcaattgatacccaaaataaacccatcacctctgagaaaatcaaagagcttgtcgtcacgcagctgggctatgacacacgtgtgaccatcctcgggcacgtgcagagaggagggaccccttcggcattcgacaggatcttggccagccgcatgggagtggaggcagtcatcgccttgctagaggccaccccggacaccccagcttgcgtcgtgtcactgaacgggaaccacgccgtgcgcctgccgctgatggagtgcgtgcagatgactcaggatgtgcagaaggcgatggacgagaggagatttcaagatgcggttcgactccgagggaggagctttgcgggcaacctgaacacctacaagcgacttgccatcaagctgccggatgatcagatcccaaagaccaattgcaacgtagctgtcatcaacgtgggggcacccgcggctgggatgaacgcagccgtacgctcagctgtgcgcgtgggcattgccgacggccacaggatgctcgccatctatgatggctttgacggcttcgccaagggccagatcaaagaaatcggctggacagatgtcgggggctggaccggccaaggaggctccattcttgggacaaaacgcgttctcccggggaagtacttggaagagatcgccacacagatgcgcacgcacagcatcaacgcgctgctgatcatcggtggattcgaggcctacctgggactcctggagctgtcagccgcccgggagaagcacgaggagttctgtgtccccatggtcatggttcccgctactgtgtccaacaatgtgccgggttccgatttcagcatcggggcagacaccgccctgaacactatcaccgacacctgcgaccgcatcaagcagtccgccagcggaaccaagcggcgcgtgttcatcatcgagaccatgggcggctactgtggctacctggccaacatgggggggctcgcggccggagctgatgccgcatacattttcgaagagcccttcgacatcagggatctgcagtccaacgtggagcacctgacggagaaaatgaagaccaccatccagagaggccttgtgctcagaaatgagagctgcagtgaaaactacaccaccgacttcatttaccagctgtattcagaagagggcaaaggcgtgtttgactgcaggaagaacgtgctgggtcacatgcagcagggtggggcaccctctccatttgatagaaactttggaaccaaaatctctgccagagctatggagtggatcactgcaaaactcaaggaggcccggggcagaggaaaaaaatttaccaccgatgattccatttgtgtgctgggaataagcaaaagaaacgttatttttcaacctgtggcagagctgaagaagcaaacggattttgagcacaggattcccaaagaacagtggtggctcaagctacggcccctcatgaaaatcctggccaagtacaaggccagctatgacgtgtcggactcaggccagctggaacatgtgcagccctggagtgtctgacccagtcccgcctgcatgtgcctgcagccaccgtggactgtctgtttttgtaacacttaagttattttatcagcactttatgcacgtattattgacattaatacctaatcggcgagtgcccatctgccccacctgctccagtgcgtgctgtctgtggagtgtgtctcatgctttcagatgtgcatatgagcagaattaattaaacatttgcctatgactccaacag

SEQ ID NO: 38 - DNA, 591 bp, Homo sapiens
cttctctgggacacattgccttctgttttctccagcatgcgcttgctccagctcctgttcagggccagccctgccaccctgctcctggttctctgcctgcagttgggggccaacaaagctcaggacaacactcggaagatcataataaagaattttgacattcccaagtcagtacgtccaaatgacgaagtcactgcagtgcttgcagttcaaacagaattgaaagaatgcatggtggttaaaacttacctcattagcagcatccctctacaaggtgcatttaactataagtatactgcctgcctatgtgacgacaatccaaaaaccttctactgggacttttacaccaacagaactgtgcaaattgcagccgtcgttgatgttattcgggaattaggcatctgccctgatgatgctgctgtaatccccatcaaaaacaaccggttttatactattgaaatcctaaaggtagaataatggaagccctgtctgtttgccacacccaggtgatttcctctaaagaaacttggctggaatttctgctgtggtctataaaataaacttcttaacatgcttaaaaaaaaaaaaaaa

SEQ ID NO: 39 - DNA, 1880 bp, Homo sapiens
gggtcggggccacaaggccgcgctaggcggacccaggacacagcccgcgcgcagcccacccgcccgccgcctgccagagctgctcggcccgcagccagggggacagcggctggtcggaggctcgcagtgctgtcggcgagaagcagtcgggtttggagcgcttgggtcgcgttggtgcgcggtggaacgcgcccagggaccccagttcccgcgagcagctccgcgccgcgcctgagagactaagctgaaactgctgctcagctcccaagatggtgccacccaaattgcatgtgcttttctgcctctgcggctgcctggctgtggtttatccttttgactggcaatacataaatcctgttgcccatatgaaatcatcagcatgggtcaacaaaatacaagtactgatggctgctgcaagctttggccaaactaaaatcccccggggaaatgggccttattccgttggttgtacagacttaatgtttgatcacactaataagggcaccttcttgcgtttatattatccatcccaagataatgatcgccttgacaccctttggatcccaaataaagaatatttttggggtcttagcaaatttcttggaacacactggcttatgggcaacattttgaggttactctttggttcaatgacaactcctgcaaactggaattcccctctgaggcctggtgaaaaatatccacttgttgttttttctcatggtcttggggcattcaggacactttattctgctattggcattgacctggcatctcatgggtttatagttgctgctgtagaacacagagatagatctgcatctgcaacttactatttcaaggaccaatctgctgcagaaataggggacaagtcttggctctaccttagaaccctgaaacaagaggaggagacacatatacgaaatgagcaggtacggcaaagagcaaaagaatgttcccaagctctcagtctgattcttgacattgatcatggaaagccagtgaagaatgcattagatttaaagtttgatatggaacaactgaaggactctattgatagggaaaaaatagcagtaattggacattcttttggtggagcaacggttattcagactcttagtgaagatcagagattcagatgtggtattgccctggatgcatggatgtttccactgggtgatgaagtatattccagaattcctcagcccctcttttttatcaactctgaatatttccaatatcctgctaatatcataaaaatgaaaaaatgctactcacctgataaagaaagaaagatgattacaatcaggggttcagtccaccagaattttgctgacttcacttttgcaactggcaaaataattggacacatgctcaaattaaagggagacatagattcaaatgtagctattgatcttagcaacaaagcttcattagcattcttacaaaagcatttaggacttcataaagattttgatcagtgggactgcttgattgaaggagatgatgagaatcttattccagggaccaacattaacacaaccaatcaacacatcatgttacagaactcttcaggaatagagaaatacaattaggattaaaataggttttttaaaagtcttgtttcaaaactgtctaaaattatgtgtgtgtgtgtgtgtgtgtgtgtgtgtgtgagagagagagagagagagagagagagagagagagagaattttaatgtattttcccaaaggactcatattttaaaatgtaggctatactgtaatcgtgattgaagcttggactaagaattttttccctttagatgtaaagaaagaatacagtatacaatattcaaaaaaaaaaaaaaaaaaaaaaaaaaaaaaaaaaaaaaaaaa

SEQ ID NO: 40 - DNA, 1038 bp, Homo sapiens
atttgaggccatataaagtcacctgaggccctctccaccacagcccaccagtgaccacgaaggctgtgctgcttgccctgttgatggcaggcttggccctgcagccaggcactgccctgctgtgctactcctgcaaagcccaggtgagcaacgaggactgcctgcaggtggagaactgcacccagctgggggagcagtgctggaccgcgcgcatccgcgcagttggcctcctgaccgtcatcagcaaaggctgcagcttgaactgcgtggatgactcacaggactactacgtgggcaagaagaacatcacgtgctgtgacaccgacttgtgcaacgccagcggggcccatgccctgcagccggctgctgccatccttgcgctgctccctgcactcggcctgctgctctggggacccggccagctctaggctctggggggccccgctgcagcccacactgggtgtggtgccccaggcctctgtgccactcctcacacacccggcccagtgggagcctgtcctggttcctgaggcacatcctaacgcaagtctgaccatgtatgtctgcgcccctgtcccccaccctgaccctcccatggccctctccaggactcccacccggcagatcggctctattgacacagatccgcctgcagatggcccctccaaccctctctgctgctgtttccatggcccagcattctccacccttaaccctgtgctcaggcacctcttcccccaggaagccttccctgcccaccccatctatgacttgagccaggtctggtccgtggtgtcccccgcacccagcaggggacaggcactcaggagggcccggtaaaggctgagatgaagtggactgagtagaactggaggacaggagtcgacgtgagttcctgggagtctccagagatggggcctggaggcctggaggaaggggccaggcctcacattcgtggggctccctgaatggcagcctcagcacagcgtaggcccttaataaacacctgttggataagccagaaaaaaaaaaaaaaaa

SEQ ID NO: 41 - DNA, 2653 bp, Homo sapiens
ctcaaaaggggccggatttccttctcctggaggcagatgttgcctctctctctcgctcggattggttcagtgcactctagaaacactgctgtggtggagaaactggaccccaggtctggagcgaattccagcctgcagggctgataagcgaggcattagtgagattgagagagactttaccccgccgtggtggttggagggcgcgcagtagagcagcagcacaggcgcgggtcccgggaggccggctctgctcgcgccgagatgtggaatctccttcacgaaaccgactcggctgtggccaccgcgcgccgcccgcgctggctgtgcgctggggcgctggtgctggcgggtggcttctttctcctcggcttcctcttcgggtggtttataaaatcctccaatgaagctactaacattactccaaagcataatatgaaagcatttttggatgaattgaaagctgagaacatcaagaagttcttatataattttacacagataccacatttagcaggaacagaacaaaactttcagcttgcaaagcaaattcaatcccagtggaaagaatttggcctggattctgttgagctagcacattatgatgtcctgttgtcctacccaaataagactcatcccaactacatctcaataattaatgaagatggaaatgagattttcaacacatcattatttgaaccacctcctccaggatatgaaaatgtttcggatattgtaccacctttcagtgctttctctcctcaaggaatgccagagggcgatctagtgtatgttaactatgcacgaactgaagacttctttaaattggaacgggacatgaaaatcaattgctctgggaaaattgtaattgccagatatgggaaagttttcagaggaaataaggttaaaaatgcccagctggcaggggccaaaggagtcattctctactccgaccctgctgactactttgctcctggggtgaagtcctatccagatggttggaatcttcctggaggtggtgtccagcgtggaaatatcctaaatctgaatggtgcaggagaccctctcacaccaggttacccagcaaatgaatatgcttataggcgtggaattgcagaggctgttggtcttccaagtattcctgttcatccaattggatactatgatgcacagaagctcctagaaaaaatgggtggctcagcaccaccagatagcagctggagaggaagtctcaaagtgccctacaatgttggacctggctttactggaaacttttctacacaaaaagtcaagatgcacatccactctaccaatgaagtgacaagaatttacaatgtgataggtactctcagaggagcagtggaaccagacagatatgtcattctgggaggtcaccgggactcatgggtgtttggtggtattgaccctcagagtggagcagctgttgttcatgaaattgtgaggagctttggaacactgaaaaaggaagggtggagacctagaagaacaattttgtttgcaagctgggatgcagaagaatttggtcttcttggttctactgagtgggcagaggagaattcaagactccttcaagagcgtggcgtggcttatattaatgctgactcatctatagaaggaaactacactctgagagttgattgtacaccgctgatgtacagcttggtacacaacctaacaaaagagctgaaaagccctgatgaaggctttgaaggcaaatctctttatgaaagttggactaaaaaaagtccttccccagagttcagtggcatgcccaggataagcaaattgggatctggaaatgattttgaggtgttcttccaacgacttggaattgcttcaggcagagcacggtatactaaaaattgggaaacaaacaaattcagcggctatccactgtatcacagtgtctatgaaacatatgagttggtggaaaagttttatgatccaatgtttaaatatcacctcactgtggcccaggttcgaggagggatggtgtttgagctagccaattccatagtgctcccttttgattgtcgagattatgctgtagttttaagaaagtatgctgacaaaatctacagtatttctatgaaacatccacaggaaatgaagacatacagtgtatcatttgattcacttttttctgcagtaaagaattttacagaaattgcttccaagttcagtgagagactccaggactttgacaaaagcaacccaatagtattaagaatgatgaatgatcaactcatgtttctggaaagagcatttattgatccattagggttaccagacaggcctttttataggcatgtcatctatgctccaagcagccacaacaagtatgcaggggagtcattcccaggaatttatgatgctctgtttgatattgaaagcaaagtggacccttccaaggcctggggagaagtgaagagacagatttatgttgcagccttcacagtgcaggcagctgcagagactttgagtgaagtagcctaagaggattctttagagaatccgtattgaatttgtgtggtatgtcactcagaaagaatcgtaatgggtatattgataaattttaaaattggtatatttgaaataaagttgaatattatatataaaaaaaaaaaaaaaaaaa

SEQ ID NO: 42 - DNA, 594 bp, Homo sapiens
aggctcactataaatagcagccacctctccctggcagacagggacccgcagctcagctacagcacagatcagcaccatgaagcttctcacgggcctggttttctgctccttggtcctgagtgtcagcagccgaagcttcttttcgttccttggcgaggcttttgatggggctcgggacatgtggagagcctactctgacatgagagaagccaattacatcggctcagacaaatacttccatgctcgggggaactatgatgctgccaaaaggggacctgggggtgcctgggctgcagaagtgatcagcaatgccagagagaatatccagagactcacaggccgtggtgcggaggactcgctggccgatcaggctgccaataaatggggcaggagtggcagagaccccaatcacttccgacctgctggcctgcctgagaaatactgagcttcctcttcactctgctctcaggagacctggctatgaggccctcggggcagggatacaaagttagtgaggtctatgtccagagaagctgagatatggcatataataggcatctaataaatgcttaagaggtggaatttgttgaaaca

SEQ ID NO: 43 - DNA, 3220 bp, Homo sapiens
acaatgactcctttcggtaagtgcagtggaagctgtacactgcccaggcaaagcgtccgggcagcgtaggcgggcgactcagatcccagccagtggacttagcccctgtttgctcctccgataactggggtgaccttggttaatattcaccagcagcctcccccgttgcccctctggatccactgcttaaatacggacgaggacagggccctgtctcctcagcttcaggcaccaccactgacctgggacagtgaatcgacaatgccgtcttctgtctcgtggggcatcctcctgctggcaggcctgtgctgcctggtccctgtctccctggctgaggatccccagggagatgctgcccagaagacagatacatcccaccatgatcaggatcacccaaccttcaacaagatcacccccaacctggctgagttcgccttcagcctataccgccagctggcacaccagtccaacagcaccaatatcttcttctccccagtgagcatcgctacagcctttgcaatgctctccctggggaccaaggctgacactcacgatgaaatcctggagggcctgaatttcaacctcacggagattccggaggctcagatccatgaaggcttccaggaactcctccgtaccctcaaccagccagacagccagctccagctgaccaccggcaatggcctgttcctcagcgagggcctgaagctagtggataagtttttggaggatgttaaaaagttgtaccactcagaagccttcactgtcaacttcggggacaccgaagaggccaagaaacagatcaacgattacgtggagaagggtactcaagggaaaattgtggatttggtcaaggagcttgacagagacacagtttttgctctggtgaattacatcttctttaaaggcaaatgggagagaccctttgaagtcaaggacaccgaggaagaggacttccacgtggaccaggtgaccaccgtgaaggtgcctatgatgaagcgtttaggcatgtttaacatccagcactgtaagaagctgtccagctgggtgctgctgatgaaatacctgggcaatgccaccgccatcttcttcctgcctgatgaggggaaactacagcacctggaaaatgaactcacccacgatatcatcaccaagttcctggaaaatgaagacagaaggtctgccagcttacatttacccaaactgtccattactggaacctatgatctgaagagcgtcctgggtcaactgggcatcactaaggtcttcagcaatggggctgacctctccggggtcacagaggaggcacccctgaagctctccaaggccgtgcataaggctgtgctgaccatcgacgagaaagggactgaagctgctggggccatgtttttagaggccatacccatgtctatcccccccgaggtcaagttcaacaaaccctttgtcttcttaatgattgaacaaaataccaagtctcccctcttcatgggaaaagtggtgaatcccacccaaaaataactgcctctcgctcctcaacccctcccctccatccctggccccctccctggatgacattaaagaagggttgagctggtccctgcctgcatgtgactgtaaatccctcccatgttttctctgagtctccctttgcctgctgaggctgtatgtgggctccaggtaacagtgctgtcttcgggccccctgaactgtgttcatggagcatctggctgggtaggcacatgctgggcttgaatccaggggggactgaatcctcagcttacggacctgggcccatctgtttctggagggctccagtcttccttgtcctgtcttggagtccccaagaaggaatcacaggggaggaaccagataccagccatgaccccaggctccaccaagcatcttcatgtccccctgctcatcccccactcccccccacccagagttgctcatcctgccagggctggctgtgcccaccccaaggctgccctcctgggggccccagaactgcctgatcgtgccgtggcccagttttgtggcatctgcagcaacacaagagagaggacaatgtcctcctcttgacccgctgtcacctaaccagactcgggccctgcacctctcaggcacttctggaaaatgactgaggcagattcttcctgaagcccattctccatggggcaacaaggacacctattctgtccttgtccttccatcgctgccccagaaagcctcacatatctccgtttagaatcaggtcccttctccccagatgaagaggagggtctctgctttgttttctctatctcctcctcagacttgaccaggcccagcaggccccagaagaccattaccctatatcccttctcctccctagtcacatggccataggcctgctgatggctcaggaaggccattgcaaggactcctcagctatgggagaggaagcacatcacccattgacccccgcaacccctccctttcctcctctgagtcccgactggggccacatgcagcctgacttctttgtgcctgttgctgtccctgcagtcttcagagggccaccgcagctccagtgccacggcaggaggctgttcctgaatagcccctgtggtaagggccaggagagtccttccatcctccaaggccctgctaaaggacacagcagccaggaagtcccctgggcccctagctgaaggacagcctgctccctccgtctctaccaggaatggccttgtcctatggaaggcactgccccatcccaaactaatctaggaatcactgtctaaccactcactgtcatgaatgtgtacttaaaggatgaggttgagtcataccaaatagtgatttcgatagttcaaaatggtgaaattagcaattctacatgattcagtctaatcaatggataccgactgtttcccacacaagtctcctgttctcttaagcttactcactgacagcctttcactctccacaaatacattaaagatatggccatcaccaagccccctaggatgacaccagacctgagagtctgaagacctggatccaagttctgacttttccccctgacagctgtgtgaccttcgtgaagtcgccaaacctctctgagccccagtcattgctagtaagacctgcctttgagttggtatgatgttcaagttagataacaaaatgtttatacccattagaacagagaataaatagaactacatttcttgca

SEQ ID NO: 44 - DNA, 3783 bp, Homo sapiens
gtattctgaggcgcgtggtagtgatggcggcgctcagtgagactttcctgtcactggctactactactcccaaccctcctcaaagccgccggagcaacccccaggtctttactttacaatcggcaatttgacttgctctgctgcatgtctggagggaccaaggaaagtgtggagacgctccaaggattaggtgatcggagcttgaaaagaaaaaaagccaaacaaataaacaaaacccacccaccctaacaaatatgaggctgctggagagaatgaggaaagactggttcatggtcggaatagtgctggcgatcgctggagctaaactggagccgtccataggggtgaatgggggaccactgaagccagaaataactgtatcctacattgctgttgcaacaatattctttaacagtggactatcattgaaaacagaggagctgaccagtgctttggtgcatctaaaactgcatctttttattcagatctttactcttgcattcttcccagcaacaatatggctttttcttcagcttttatcaatcacacccatcaacgaatggcttttaaaaggtttgcagacagtaggttgcatgcctccgcctgtgtcttctgcagtgattttaaccaaggcagttggtggaaatgaggcagctgcaatatttaattcagcctttggaagttttttgggcatcgttataacacccctgctcctgctgctttttcttggttcatcttcttctgtgcctttcacatctattttttctcagctttttatgactgttgtggttcctctcatcattggacagattgtccgaagatacatcaaggattggcttgagagaaagaagcctccttttggtgctatcagcagcagtgtactcctcatgatcatctacacaacattctgtgacacgttctctaacccaaatattgacctggataaattcagccttgttctcatactgttcataatattttctatccagctgagttttatgcttttaactttcatcttttcaacaaggaataattcgggtttcacaccagcagacacagtggctatcattttctgttctacacacaaatcccttacattgggaattccgatgctgaagatcgtgtttgcaggccatgagcatctctctttaatatctgtacccttgctcatctaccacccagctcagatccttctgggaagtgtgttggtgccaacaatcaagtcttggatggtatcaaggcagaagggagtgaagctgacaaggccgacagtataacaaaggaggtggactttctgtagcaatgtatatatgtacaggattgtacatactagcaattctgaagacttgtacttgtgaatgttgcctcaatgcatattttatttttttacacaaaaatatgagatcctgtttaagtgccttaaaatgtatttgacaagagcgttatttccaaaatatgctttgttgattactgccaggggtggtacaatatttgggggttaattttgctttcctaatgcaggaatcagtcatggtaagtgacaaaaagcaaacatgctttccctgcagcacctttgtgcaatacaaccctatagtagttactgtaatgtttgaaatgaggtcacaccatcaggaaaatgcccttctgatgacagtgaaaatttccaaagtcttattcatgcatactttgatttactgtgtgattctttttttctacgactgtgacatgcctcttccttatcaactcagcaggggtcatagatcgaatagatgctgaaaagcgtaagatatatgcattccttgacatcatttttaaagacattccttcaaatagtttccacacagaaattcctcactcccattatgagagattgtggttatatgtcttaaatttattataagctgcttcaaagaaagggtctgaatgtttgaattatgagtgaaatcatgtgaaattttgagttaaactctgtgatttgattttcagggtctttaaaatatatcttaatatcttcttcctctttattcaataatttctgtcttgcacttacacactcataacagccaaatatgaggcacaaaaatgttacaatcagtttgaaagcagcatcaattaatggtagattctattcacattccacaacccagaccaaatttttttcctattacgcagatgtgctgagcactttccagattgcccctgttggccaaaagcagcctgttacatcctggaattaagcacacttaaggtatttgagacaatttattaatgaaaatttccttggcagatttgacaaatgttggcaatatttttttagaagttaaatcatattgctttcatgaataaatgaaaatataaaggtcatggatgcaaacaaatgttacatatacacattctgtctctccagatgaaaagaacatgcaaaaccatttaataaccaaaatatcaagtaaaattagttcccaacggggcagcagctttcaaatgagtgtccaatatttgcttctgctatagctgcaagaactgtaactggacccaagtagagaatgaagccacgtatagaactacgagaacacttttctgtgtttcccccatgccgtcctgtcacatcctcttacacgtcctctcttgatttgatagacaatattggcatcctgggtctcactgaggccgtgctatgtcctcagcagctgtttttgttgtttcgttattatgcccacaacaaaaaatcattccttagaaactcaccaagtttatctactgtgtaaatttatattattgttactaccaggtctcatcttttgtcaatgtcattgaataaatttcataagagttattctcagtgtgaattttaaggctaatgccagatcctgcaaaaatctatgctaaccaggctgtagtacacactgttataaagaattttacttgtgtctaaaactacagtaattttgcttaggtaattgtgcttacctatggagcacaggaaggctcttaggttttgttcctacaagtttctttgaattttggagtaaatggaagtgtctgtctgtctgtcatctatctgccctatcataaaaatctttctccctaacattaaaatactgatccccgcccccaacttatctacctctattgtctaacacctatagtaggtgtgatcatgggataaaattcaactgaaaatgctatgataacattttatcgtttgctttaaaaatgtgctttgttttcaaataatctttacatagtgaactttggtggcgttagtgatatgtttatgcctatttcttttttttacacaaattccttggcatattttttcataaagaacaaaaaataaaatcaaaatttatttttaattcatgcttattgggatttaattattcagagcttaaaatattttgttatgtttatacactgtaaagctatctgttttatgcatttgttttgtctaaatgtatttatgaaagaaatacattagattatatttatgtttactcatttttccacctggattttttttaatggttgttacaaaattagattttttaatgggtaataatgttggtattttcatgttttttcttagtattaaaatttttgtgggttttttaaaatttttccctattctgttaaaaattaacacacctctagctaatgttcagtgtttgtgctaaataccaaattttttcaaaaggattggttaagtcataaagtggattatttatgatgactggaagatgaaaataattatatgattaaacaaagaatgtttcagaaatc

SEQ ID NO: 45 - DNA, 6937 bp, Homo sapiens
ccgggtcctgggcgagcgggcgccgtgcgcgtgtcccgcggccgagctgctaataaagttgcagcgaggagaagcgcagcgacggcgtcgggagagcgcgcctagccggctcgcgagacttgacccaatgaaagaagcatatggcacttgtgaagataaatgttactcctccctttttaattggaacttctgcttaggacctgtgtatgacgtttcacctgtgatctgttctttcggtagccactgactttgagttacaggaaggtctccgaagatttgtgtcaaatgacgtcaatggccagcttgttttcttttactagtccagcagtaaagcgattgttgggctggaaacaaggtgatgaggaggagaaatgggcagaaaaggcagttgatgctttggtgaagaaactaaaaaagaaaaagggtgccatggaggaactggagaaagccttgagcagtccaggacagccgagtaaatgtgtcactattcccagatctttagatggacgcctgcaggtttctcacagaaaaggcttaccccatgttatatattgtcgtgtttggcgctggccggatttgcagagtcatcatgagctaaagccgttggatatttgtgaatttccttttggatctaagcaaaaagaagtttgtatcaacccataccactataagagagtggagagtccagtcttacctccagtattagtgcctcgtcataatgaattcaatccacaacacagccttctggttcagtttaggaacctgagccacaatgaaccacacatgccacaaaatgccacgtttccagattctttccaccagcccaacaacactccttttcccttatctccaaacagcccttatcccccttctcctgctagcagcacatatcccaactccccagcaagttctggaccaggaagtccatttcagctcccagctgatacgcctcctcctgcctatatgccacctgatgatcagatgggtcaagataattcccagcctatggatacaagcaataatatgattcctcagattatgcccagtatatccagcagggatgttcagcctgttgcctatgaagagcctaaacattggtgttcaatagtctactatgaattaaacaatcgtgttggagaagcttttcatgcatcttctactagtgtgttagtagatggattcacagatccttcaaataacaaaagtagattctgcttgggtttgttgtcaaatgttaatcgtaattcgacaattgaaaacactaggcgacatattggaaaaggtgttcatctgtactatgttggtggagaggtgtatgcggaatgcctcagtgacagcagcatatttgtacagagtaggaactgcaactttcatcatggctttcatcccaccactgtctgtaagattcccagcagctgcagcctcaaaatttttaacaatcaggagtttgctcagcttctggctcaatctgtcaaccatgggtttgaggcagtatatgagctcaccaaaatgtgtaccattcggatgagttttgtcaagggttggggagcagaatatcaccggcaggatgtaaccagcaccccatgttggattgagattcatcttcatgggcctcttcagtggctggataaagtccttactcagatgggctcccctctgaaccccatatcttctgtttcataatgcagaagtattcttttcaattatattgttagtggacttgttttaattttagagaaactttgagtacagatactgtgagcttacattgaaaacagatattacagcttatttttttctacataattgtgaccaatacatttgtattttgtgatgaatctacatttgtttgtattcatgttcatgtgattaactcttagaagtgttgtaaaagatgcagagtaagtattatgccccagttcagaaatttggcattgatcttaaactggaacatgcttttactttattgccctaacaattttttattaaatttatttgaaaatgcatcacatgatgaaaaattatagtagcttataagagggcatatacagtgaagagtaagttttccctcctactctcgatcttccagaagctgtacttttaccagtttctttgtcccaccaacttaaaaaaaaaaagtacaattcattgttttgcaaaagtgtatggtaggggcttaaaagaaactataaagttttatttgaatgaacactatgcactgctgtaactggtagtgttcagtaaaagcaaaatgatagttttctagatgacataaaatttacatttaatacagataagtgttcttcagtgtaatgtgacttcatgctatatatcttttgtaagacatttccttttttaaaaaaatttttgcaaataactgatctcaagtatatgtcatttactcaaaatctgtcataagcattactttatagctagtgacagtgcatgcacagccttgttcaactatgtttgctgcttttggacaatgttgcaagaactctatttttgacatgcattaatcttttattttgcacttttatgggtgacagtttttagcataacctttgataaaatacactcaagtgacttggacttagatgcttatccttacgtccttggtaccttttttgtattaacaaacactgcaatttatagattacatttgtaggaagttatgcttttttctggtttttgttttactttcaacctaggttataagactgttattctatagctccaacttaaggtgcctttttaattccctacagttttatgggtgttatcagtgctggagaatcatgtagttaatcccattgctcttacaagtgtcagcttacttgtatcagcctccctacgcaaggacctatgcactggagccgtaggaggctcttcagttgggccccaaggataaggctactgatttgatactaaatgaatcagcagtggatgtagggatagctgattttaaaacactcggctgggcacagtggctcacacctgtaatcccagcactttgggaggctgaggcaggcagatcatgatgtcaggagtttgagaccagcctggccaatatggtgaaaccctgtctctacaaaaaatacaaaaattagctgggcatggtggtgcgtgcctgaagtcccagctactcgggaagctgaggcagaagaatcacttgaacctgggaggcggaggttgtggtgagccgagatcgcaccactgcactccagcctgggcgacagagcgagactctgcctcaaaaaacaaaacaaaacaaaacactcacccatcaacgaatatagactcttctctcatttatcgatgatcctctttttccattttttaagtacttatgtggaagctagtctcccaaaacacaatctttagagagaaaagacatgaacgaactccaaaatatccatttaatcaatcatgtttttggctttggataaagaactttgaaccagtttttttctcaggagctgtcaaatggacacttaattatgacatgagaatgaagaaattattttggaaaaaaaaaatgacctaatttacctatcagtgaaagctttattttctggtgccttttgaaagtatatggagtcatatcattcttctgtttaaaatgttagtttggtttgactttccactttgtcctttctgctcttgtgaagaaaaaaaaaagcattttcgaggaaagaattatgcaatttcttttgttttctgtgtcattatttattgctttttcaatgtgcagccagtggatggttttagttctttcagatgaactgccatttgtgtttcagctcacagttctttgctgggtaaaagaaatactttctgacagtcacctgagccttaaatgtaagtattacatgacatgcattctgtttcttccagagttctgtctgccacacgaaagagaatatttgcttacttgatagaactttggcattttcatcattcttttacttaaccaggcttatggcatgatctctggaacaaatttgtaggaaaaaattactccaattgaatgactgatgtatgtaatcaacttcattgggctgcagtaaactagtggaaattagagagttgttttattggtgttttctactgtgagttaattaaaaattgtttttatttggggtcattatgtcacagtcttgagttaacaagatcttacgtgattggccttttctttgttttctcttaggagttgtgtctcatgaatgacagtactaaagctattaacaactaagagtttgacagagaactataagcctgttgtatctcctaaaagttgtcaactccccacccttggactttaaatgaaaattttattcagtccagctattcttacagtccctaaggattttcatatatctatgtataggagataaaatttgctagtaagatttttaaaaactggctagtgaaaggaaagtacctctgaaagaaaccattttagcaaattatggttatatgttttaatttaatctacagaatgttttatagtaaaattctagcaccactagaataatcacatagcatgtacaatatatttatgctggctgaaaagacagaatctgggaataataaaattgcaaccagtttggtaatgcaaacagcagaatagaatgaaatctcagtaatgaattaaagcaacaaaaagatattgattggcaaaaagcaagatataagagattcatttgcttaacatttctacataatatttatggtctggtcagtattggtctggtcagtattgcctggctgacgtgaaatgtaaactagtaggcgtgttattgatctgctaaaactaaccctctttttaagaggagatttaaggaagacgtcaatcaaaatgtcaaatatgtgtgtcagaatataaataatttttcacattgtattgttgctatataaaaaaaataatagaattggttgggtttctgaggtgaaatccagagtaagagtactagacagttcaacaagccacatctaatggcacagatagaggatgtagctattttatacctttcataacatttgagagtaagatatccttcaggatgtgaagtgattattaagtactcatacctgaaatctgttgtcaagattagaactggggttcatgttaaaaaccttccatattacctgagggtacctgtggggaacagttccttcccctgtgtggtagtattttgttggaagagaatgtttatacaaaaaatgaaattcttccaacagcagagaaactctaaaaagtttgatagtacctatcaaagtgctgtacttctgtgatagagaacatctgatgtaccaatttagatctatttctttatactttttctaatcaattgcttaatagtactttggatgattatcacctttgccacttaaaatatataaatatcctttttacttcatgaggaaggaagaattttttgataattactgagttcagccttttgtgatgacttatattttggacttacattttaactttaaagaatgtcagatcccttctttgtcttactagttaaatcctcacctaatctcttgggtatgaatataaatgtgtgtcatcgttatattgttcagctagatgagcaagtatcttagggtagtaggtagcctggtggttttagaagtgtttggtgatttttatggagagagttttcctaagtggtggtttataggtggtatcagatattattagggcagctttttggggagtaatctcaggtctcccagagcagcagcatttttctcattgatataagtaagattcttaggagcttttcttatcacacaagatgcctgaatcgaatgtgagaattgaaggcatttcttctgcataaacaaagaattctacctgctggacagaaacctggaaagttctttggaattcgctgaattacagtttagtatgtcctgattacagagtgacaatatttatcaagcctttgttatattggattatcttctctcttaaaatacaactgtattataattgaaatgacagcccaaaattggatggtttaccaaaaccaatgaaagggatttcacacatcaatttttatttctgttttgaagagcacatgctatataataattgctagtagcaactgcagtaaaacaggtgataagttattttctctgaaaagatccagtcctagagcaggattcttcgatcattcatggcagagtgaaaaaggtttgtatggttcttgtccaaataactcagttcttaaaattcttaaaatgatcgtaaaccattatcctttaaaggtttatttgaagatgctgttaaagtacagaattttgtgtacaggtagatttttccgtccctcattaatagtgccttcttaattaatacagactggtgttagctataacaaaactccagtaaggccaaagaatcccaagttctttgtggaaaaaaaaaaaaaatcttttagggtcagattttcccttctaatatcattgaagatgatgttgcattgatttattcataaagtattttaactataggaactctagaagataatggttaggcaagtgattttttttttaaatatggttggcgtaagttgtattttgaaattcacttattttaaaatcgaagaggattgtaatcatggaaatagaatgtttgtatctacctgcccacattttcttaaaaagatatttcatatacagataatgaagaccaagctagtggctgcactgtaggtctgctgcttatttgtatttgttgtgcttctgtttatgttgtagaagctgaaattctagcaacatgcttcaattctgttattttgatacttatgaaaatgtattaggttttactatattgtgcttttgaaagccataactcttaagaactttgtttttgcatattgtttgctaattctttactttaataaacctcaaaacctgc

SEQ ID NO: 46 - DNA, 1883 bp, Homo sapiens
gggaggggaggggagggataggacagacagacaaagaaaggggtgcggcagcactgccaggggaagagggtgatccgacccggggaaggtcgctgggcagggcgagttgggaaagcggcagcccccgccgcccccgcagccccttctcctcctttctcccacgtcctatctgcctctcgctggaggccaggccgtgcagcatcgaagacaggaggaactggagcctcattggccggcccggggcgccggcctcgggcttaaataggagctccgggctctggctgggacccgaccgctgccggccgcgctcccgctgctcctgccgggtgatggaaaaccccagcccggccgccgccctgggcaaggccctctgcgctctcctcctggccactctcggcgccgccggccagcctcttgggggagagtccatctgttccgccagagccccggccaaatacagcatcaccttcacgggcaagtggagccagacggccttccccaagcagtaccccctgttccgcccccctgcgcagtggtcttcgctgctgggggccgcgcatagctccgactacagcatgtggaggaagaaccagtacgtcagtaacgggctgcgcgactttgcggagcgcggcgaggcctgggcgctgatgaaggagatcgaggcggcgggggaggcgctgcagagcgtgcacgcggtgttttcggcgcccgccgtccccagcggcaccgggcagacgtcggcggagctggaggtgcagcgcaggcactcgctggtctcgtttgtggtgcgcatcgtgcccagccccgactggttcgtgggcgtggacagcctggacctgtgcgacggggaccgttggcgggaacaggcggcgctggacctgtacccctacgacgccgggacggacagcggcttcaccttctcctcccccaacttcgccaccatcccgcaggacacggtgaccgagataacgtcctcctctcccagccacccggccaactccttctactacccgcggctgaaggccctgcctcccatcgccagggtgacactggtgcggctgcgacagagccccagggccttcatccctcccgccccagtcctgcccagcagggacaatgagattgtagacagcgcctcagttccagaaacgccgctggactgcgaggtctccctgtggtcgtcctggggactgtgcggaggccactgtgggaggctcgggaccaagagcaggactcgctacgtccgggtccagcccgccaacaacgggagcccctgccccgagctcgaagaagaggctgagtgcgtccctgataactgcgtctaagaccagagccccgcagcccctggggccccccggagccatggggtgtcgggggctcctgtgcaggctcatgctgcaggcggccgagggcacagggggtttcgcgctgctcctgaccgcggtgaggccgcgccgaccatctctgcactgaagggccctctggtggccggcacgggcattgggaaacagcctcctcctttcccaaccttgcttcttaggggcccccgtgtcccgtctgctctcagcctcctcctcctgcaggataaagtcatccccaaggctccagctactctaaattatgtctccttataagttattgctgctccaggagattgtccttcatcgtccaggggcctggctcccacgtggttgcagatacctcagacctggtgctctaggctgtgctgagcccactctcccgagggcgcatccaagcgggggccacttgagaagtgaataaatggggcggtttcggaagcgtcagtgtttccatgttatggatctctctgcgtttgaataaagactatctctgttgctcacaaaaaaaaaaaaaaaaaaaaa

SEQ ID NO: 47 - DNA, 1616 bp, Homo sapiens
ctccctgtgttggtggaggatgtctgcagcagcatttaaattctgggagggcttggttgtcagcagcagcaggaggaggcagagcacagcatcgtcgggaccagactcgtctcaggccagttgcagccttctcagccaaacgccgaccaaggaaaactcactaccatgagaattgcagtgatttgcttttgcctcctaggcatcacctgtgccataccagttaaacaggctgattctggaagttctgaggaaaagcagctttacaacaaatacccagatgctgtggccacatggctaaaccctgacccatctcagaagcagaatctcctagccccacagacccttccaagtaagtccaacgaaagccatgaccacatggatgatatggatgatgaagatgatgatgaccatgtggacagccaggactccattgactcgaacgactctgatgatgtagatgacactgatgattctcaccagtctgatgagtctcaccattctgatgaatctgatgaactggtcactgattttcccacggacctgccagcaaccgaagttttcactccagttgtccccacagtagacacatatgatggccgaggtgatagtgtggtttatggactgaggtcaaaatctaagaagtttcgcagacctgacatccagtaccctgatgctacagacgaggacatcacctcacacatggaaagcgaggagttgaatggtgcatacaaggccatccccgttgcccaggacctgaacgcgccttctgattgggacagccgtgggaaggacagttatgaaacgagtcagctggatgaccagagtgctgaaacccacagccacaagcagtccagattatataagcggaaagccaatgatgagagcaatgagcattccgatgtgattgatagtcaggaactttccaaagtcagccgtgaattccacagccatgaatttcacagccatgaagatatgctggttgtagaccccaaaagtaaggaagaagataaacacctgaaatttcgtatttctcatgaattagatagtgcatcttctgaggtcaattaaaaggagaaaaaatacaatttctcactttgcatttagtcaaaagaaaaaatgctttatagcaaaatgaaagagaacatgaaatgcttctttctcagtttattggttgaatgtgtatctatttgagtctggaaataactaatgtgtttgataattagtttagtttgtggcttcatggaaactccctgtaaactaaaagcttcagggttatgtctatgttcattctatagaagaaatgcaaactatcactgtattttaatatttgttattctctcatgaatagaaatttatgtagaagcaaacaaaatacttttacccacttaaaaagagaatataacattttatgtcactataatcttttgttttttaagttagtgtatattttgttgtgattatctttttgtggtgtgaataaatcttttatcttgaatgtaataagaatttggtggtgtcaattgcttatttgttttcccacggttgtccagcaattaataaaacataaccttttttactgcctaaaaaaaaaaaaaaaaaaaaaaaaaaaaaaaaaa

SEQ ID NO: 48 - DNA, 4044 bp, Homo sapiens
gccggagcggccaggccgccgtctgcccgtcccgctggacgtcccgcggtccgccctcccgtgcgtccgtctgccggtgagcccgcccgcccgccggcccagaacagagaacagaagctcagagaagtgaagcaacttgcccagctatgagagacagagccaggatttgaaaccagatgaggacgctgaggcccagagagggaaagccacttgcctagggacacacagcggggagaggtggagcagggcctctatttcgagacccctgactccacacctggtgtttgtgccaagaccccaggctgcctcccaggtcctctgggacagcccctgccttctaccaggaccatgggtagcaacaagagcaagcccaaggatgccagccagcggcgccgcagcctggagcccgccgagaacgtgcacggcgctggcgggggcgctttccccgcctcgcagacccccagcaagccagcctcggccgacggccaccgcggccccagcgcggccttcgcccccgcggccgccgagcccaagctgttcggaggcttcaactcctcggacaccgtcacctccccgcagagggcgggcccgctggccggtggagtgaccacctttgtggccctctatgactatgagtctaggacggagacagacctgtccttcaagaaaggcgagcggctccagattgtcaacaacacagagggagactggtggctggcccactcgctcagcacaggacagacaggctacatccccagcaactacgtggcgccctccgactccatccaggctgaggagtggtattttggcaagatcaccagacgggagtcagagcggttactgctcaatgcagagaacccgagagggaccttcctcgtgcgagaaagtgagaccacgaaaggtgcctactgcctctcagtgtctgacttcgacaacgccaagggcctcaacgtgaagcactacaagatccgcaagctggacagcggcggcttctacatcacctcccgcacccagttcaacagcctgcagcagctggtggcctactactccaaacacgccgatggcctgtgccaccgcctcaccaccgtgtgccccacgtccaagccgcagactcagggcctggccaaggatgcctgggagatccctcgggagtcgctgcggctggaggtcaagctgggccagggctgctttggcgaggtgtggatggggacctggaacggtaccaccagggtggccatcaaaaccctgaagcctggcacgatgtctccagaggccttcctgcaggaggcccaggtcatgaagaagctgaggcatgagaagctggtgcagttgtatgctgtggtttcagaggagcccatttacatcgtcacggagtacatgagcaaggggagtttgctggactttctcaagggggagacaggcaagtacctgcggctgcctcagctggtggacatggctgctcagatcgcctcaggcatggcgtacgtggagcggatgaactacgtccaccgggaccttcgtgcagccaacatcctggtgggagagaacctggtgtgcaaagtggccgactttgggctggctcggctcattgaagacaatgagtacacggcgcggcaaggtgccaaattccccatcaagtggacggctccagaagctgccctctatggccgcttcaccatcaagtcggacgtgtggtccttcgggatcctgctgactgagctcaccacaaagggacgggtgccctaccctgggatggtgaaccgcgaggtgctggaccaggtggagcggggctaccggatgccctgcccgccggagtgtcccgagtccctgcacgacctcatgtgccagtgctggcggaaggagcctgaggagcggcccaccttcgagtacctgcaggccttcctggaggactacttcacgtccaccgagccccagtaccagcccggggagaacctctaggcacaggcgggcccagaccggcttctcggcttggatcctgggctgggtggcccctgtctcggggcttgccccactctgcctgcctgctgttggtcctctctctgtggggctgaattgccaggggcgaggcccttcctctttggtggcatggaaggggcttctggacctagggtggcctgagagggcggtgggtatgcgagaccagcacggtgactctgtccagctcccgctgtggccgcacgcctctccctgcactccctcctggagctctgtgggtctctggaagaggaaccaggagaagggctggggccggggctgagggtgcccttttccagcctcagcctactccgctcactgaactccttccccacttctgtgccacccccggtctatgtcgagagctggccaaagagcctttccaaagaggagcgatgggcccctggccccgcctgcctgccaccctgccccttgccatccattctggaaacacctgtaggcagaggctgccgagacagaccctctgccgctgcttccaggctgggcagcacaaggccttgcctggcctgatgatggtgggtgggtgggatgagtaccccctcaaaccctgccctccttagacctgagggacccttcgagatcatcacttccttgcccccatttcacccatggggagacagttgagagcggggatgtgacatgcccaaggccacggagcagttcagagtggaggcgggcttggaacccggtgctccctctgtcatcctcaggaaccaacaattcgtcggaggcatcatggaaagactgggacagcccaggaaacaaggggtctgaggatgcattcgagatggcagattcccactgccgctgcccgctcagcccagctgttgggaacagcatggaggcagatgtggggctgagctggggaatcagggtaaaaggtgcaggtgtggagagagaggcttcaatcggcttgtgggtgatgtttgaccttcagagccagccggctatgaaagggagcgagcccctcggctctggaggcaatcaagcagacatagaagagccaagagtccaggaggccctggtcctggcctccttccccgtactttgtcccgtggcatttcaattcctggccctgttctcctccccaagtcggcaccctttaactcatgaggagggaaaagagtgcctaagcgggggtgaaagaggacgtgttacccactgccatgcaccaggactggctgtgtaaccttgggtggcccctgctgtctctctgggctgcagagtctgccccacatgtggccatggcctctgcaactgctcagctctggtccaggccctgtggcaggacacacatggtgagcctagccctgggacatcaggagactgggctctggctctgttcggcctttgggtgtgtggtggattctccctgggcctcagtgtgcccatctgtaaaggggcagctgacagtttgtggcatcttgccaagggtccctgtgtgtgtgtatgtgtgtgcatgtgtgcgtgtctccatgtgcgtccatatttaacatgtaaaaatgtcccccccgctccgtcccccaaacatgttgtacatttcaccatggccccctcatcatagcaataacattcccactgccaggggttcttgagccagccaggccctgccagtggggaaggaggccaagcagtgcctgcctatgaaatttcaacttttcctttcatacgtctttattacccaagtcttctcccgtccattccagtcaaatctgggctcactcaccccagcgagctctcaaatccctctccaactgcctaaggccctttgtgtaaggtgtcttaatactgtcctttttttttttttaacagtgttttgtagatttcagatgactatgcagaggcctgggggacccctggctctgggccgggcctggggctccgaaattccaaggcccagacttgcggggggtgggggggtatccagaattggttgtaaatactttgcatattgtctgattaaacacaaacagacctcagaaaaaaaaaaaaaaaaaaaaaaaaaaaaaaaaaaaaaaaaaaaaaaaa

SEQ ID NO: 49 - DNA, 4510 bp, Homo sapiens
gctgaggccaggagggcgcactggggattggaggcgagggaagtgcagggcgcatcccaggcggcagggctcccagcatcggcagtcgccatcaccgccagaccgcagagacaggttcggatccgcggtcctcttgcctctttccaggcctcgatgagtgttaaatcgccatttaatgtgatgtcaagaaataatttggaagcacctccttgtaagatgacagagccatttaattttgagaaaaatgaaaacaagcttccaccacatgagtctttaagaagtcctggaacacttcctaaccaccctaatttcaggctgaaaagctcagagaatggaaataaaaagaacaattttttgctttgtgagcaaaccaaacaatatttggctagtcaggaagacaattcagtttcttcaaacccgaatggcatcaacggagaagtagttggctccaaaggagacaggaaaaaattgccagcaggaaactcagtgtcaccaccaagtgctgaaagtaattcaccacccaaagaagtgaatattaagcctggaaataatgtacgtcctgcaaaatcaaaaaaactaaacaagttggtcgagaattccttgtccataagtaatccagggctcttcacctccttaggacctcctcttcggtccacaacttgccatcgctgtggcctatttggatcgctgaggtgctctcagtgcaagcagacctactattgctccacagcatgtcaaagaagagactggtctgcacacagcatcgtgtgcaggcctgttcagccaaatttccacaaacttgaaaataaatcatctattgaaacaaaggatgtggaggtaaacaataagagtgactgtccacttggagttactaaggaaatagccatttgggctgagagaataatgttttctgatttgagaagtctacaactcaagaaaaccatggaaataaagggtacggttaccgaattcaaacacccaggggacttctacgtgcagttatattcttcagaagttttagaatacatgaaccaactctctgccagcttaaaagaaacatatgcaaatgtgcatgaaaaagactatattcctgttaagggggaagtttgtattgccaagtacactgttgatcagacctggaacagagcaatcatacaaaacgttgatgtgcagcaaaagaaggcacatgtcttatatattgattatggaaatgaagaaataattccattaaacagaatttaccacctcaacaggaacattgacttgtttcctccttgtgccataaagtgctttgtagccaatgttatcccagcagaagggaattggagcagtgattgtatcaaagctactaaaccactgttaatggagcagtactgctccataaagattgtcgacatcttggaagaggaagtggttacctttgctgtagaagttgagctgccaaattcaggaaaacttttagaccatgtgcttatagaaatgggatatggcttgaaacccagtggacaagattctaagaaggaaaatgcagatcaaagtgatcctgaagatgttggaaaaatgacaactgaaaacaacattgtcgtagacaaaagtgacctaatcccaaaagtgttaactttgaatgtaggtgatgagttttgtggtgtggttgcccacattcaaacaccagaagacttcttttgtcaacaactgcaaagtggccgaaagcttgctgaacttcaggcatcccttagcaagtactgtgatcagttgcctccacgctctgatttttatccagccattggtgatatatgttgtgctcagttctcagaggatgatcagtggtaccgtgcctctgttttggcttacgcttctgaagaatctgtactggtcggatatgtagattatggaaactttgaaatccttagtttgatgagactttgtcccataatcccaaagttgttggaattgccaatgcaagctataaagtgtgtactagcaggagtaaagccatcattaggaatttggactccagaagctatttgtctcatgaaaaaacttgtacagaacaaaataatcacagtgaaagtggtggacaagttggaaaacagttccctggtggagcttattgataaatccgagacgcctcatgtcagtgttagcaaagttctcctagatgcaggctttgctgtgggagaacagagtatggtgacagataaacccagtgacgtgaaagaaaccagtgttcccttgggtgtggaaggaaaagtaaatccattggagtggacatgggttgaacttggtgttgaccaaacagtagatgttgtggtctgtgtgatatatagtcctggagaattttattgccatgtgcttaaagaggatgctttaaagaaactcaatgatttgaacaagtcattagcagaacactgccagcagaagttacctaatggtttcaaggcagagataggacaaccttgttgtgctttttttgcaggtgatggtagttggtatcgtgctttagtcaaggaaatcttaccaaatggacatgttaaagtacattttgtggattatggaaacatcgaagaagttactgcagatgaactccgaatgatatcatcaacatttttaaaccttccctttcagggaatacggtgccagttagcagatatacagtctagaaacaaacattggtctgaagaagccataacaagattccagatgtgtgttgctgggataaaattgcaagccagagtggttgaagtcactgaaaatgggataggagttgaactcaccgatctctccacttgttatcccagaataattagtgatgttctgattgatgaacatctggttttaaaatctgcttcaccacataaagacttaccaaatgacagacttgttaataaacatgagcttcaagttcatgtacagggacttcaagctacctcttcagctgagcaatggaagacgatagaattgccagtggataaaactatacaagcaaatgtattagaaatcataagcccaaacttgttttatgctctaccaaaagggatgccagaaaatcaggaaaagctgtgcatgttgacagctgaattattagaatactgcaatgctccgaaaagtcgaccaccctatagaccaagaattggagacgcatgctgtgccaaatacacaagtgatgatttttggtatcgtgcagttgttctggggacatcagacactgatgtggaagtgctctatgcagactatggaaacattgaaaccctgcctctttgcagagtgcaaccaatcacctctagccacctggcgcttcctttccaaattattagatgttcacttgaaggattaatggaattgaatggaagctcttctcaattaataataatgctattaaaaaatttcatgttgaatcagaatgtaatgctttctgtgaaaggaattacaaagaatgtccatacagtgtcagttgagaaatgttctgagaatgggactgtcgatgtagctgataagctagtgacatttggtctggcaaaaaacatcacacctcaaaggcagagtgctttaaatacagaaaagatgtataggatgaattgctgctgcacagagttacagaaacaagttgaaaaacatgaacatattcttctcttcctcttaaacaattcaaccaatcaaaataaatttattgaaatgaaaaaactgttaaaaaaaacagcatctcttggaggtaaacccttatgagacaggaaacagcaaaggctagctttaggagagaaagtacagcacctggtgtttttatttatgagaaccttttctttgtccactttctctgtaatgaccttctatccctccgtttttgcctgcctgccattctcctattaggttggtggtttttattttcctctaagttccttccaccaaataaatattacgtaaaaaattcataccaaatcaatgagaatactggcaaggaatacatagggactttctgctatatatgtaactttttattacttaaaggtaccgaaggaaggccaggtgcagtggctcacgcccagcactttgggaggctgaggtgggaggatcccttgaggccaggagttcaaggttacagtgagctatgatagtgccactgcactccagcctgggtgacagattttgtcttaaaaaaaaaaaaaaaaaagttgatatgagttttattttctgtccgtttgaaatattttgtaatattccctgcattctctgtcgtctgcctcttccacataatgtcctttgctttcatgtttgttatcttctttttctgttcactcagaggtcatcaatttctttctctccgtccttaattggattatttttcttttggcctttgggcacagagtctgacctctggaccactctaactggagaaggaactttatgttccctctcctgctgtgtccacaaccttagaaatctgtagctagatttttgttgttatagatagaatttactgtttctgaaacccaaatacagttatcagtttaaggtt

SEQ ID NO: 50 - DNA, 3300 bp, Homo sapiens
acgggagctctttcccttctctcctcctcctcgcccttctcctcgccctcctcctcctcctcgccctcctcttcctcctcctcctccttgccctcctcctctccctcctccttctcctcctccacctcctctccctcctcctcctcctcctgcgctcaccgccggcagccagcactttgcgctcacccagagagtagctccacttgggtgcgagaccgagaggggcatatccgttcacgccgatccatgaaaatgctttggaaattgacggataatatcaagtacgaggactgcgaggaccgtcacgacggcaccagcaacgggacggcacggttgccccagctgggcactgtaggtcaatctccctacacgagcgccccgccgctgtcccacacccccaatgccgacttccagcccccatacttccccccaccctaccagcctatctacccccagtcgcaagatccttactcccacgtcaacgacccctacagcctgaaccccctgcacgcccagccgcagccgcagcacccaggctggcccggccagaggcagagccaggagtctgggctcctgcacacgcaccgggggctgcctcaccagctgtcgggcctggatcctcgcagggactacaggcggcacgaggacctcctgcacggcccacacgcgctcagctcaggactcggagacctctcgatccactccttacctcacgccatcgaggaggtcccgcatgtagaagacccgggtattaacatcccagatcaaactgtaattaagaaaggccccgtgtccctgtccaagtccaacagcaatgccgtctccgccatccctattaacaaggacaacctcttcggcggcgtggtgaaccccaacgaagtcttctgttcagttccgggtcgcctctcgctcctcagctccacctcgaagtacaaggtcacggtggcggaagtgcagcggcggctctcaccacccgagtgtctcaacgcgtcgctgctgggcggagtgctccggagggcgaagtctaaaaatggaggaagatctttaagagaaaaactggacaaaataggattaaatctgcctgcagggagacgtaaagctgccaacgttaccctgctcacatcactagtagagggagaagctgtccacctagccagggactttgggtacgtgtgcgaaaccgaatttcctgccaaagcagtagctgaatttctcaaccgacaacattccgatcccaatgagcaagtgacaagaaaaaacatgctcctggctacaaaacagatatgcaaagagttcaccgacctgctggctcaggaccgatctcccctggggaactcacggcccaaccccatcctggagcccggcatccagagctgcttgacccacttcaacctcatctcccacggcttcggcagccccgcggtgtgtgccgcggtcacggccctgcagaactatctcaccgaggccctcaaggccatggacaaaatgtacctcagcaacaaccccaacagccacacggacaacaacgccaaaagcagtgacaaagaggagaagcacagaaagtgaggctctcctcccgccccgcccctcccacgcctcaccagccccccgcgcgcccaccctccggcgggtgacagctccgggatcagcaacccttcctgctgctgctactgctgctgctgctgccgccgccgccgccgccgctgcccttgggtccccccgagtctccgggactgccctctcgactgtcagtggggcagcctctccgactctgcacccgcctcgacctccccacccgctcccacacccctgtgccctcatgtggagcctaagagaacagaacaggccgtgaagccagcagagaaaagttctgccaagtttgtgaacccttttttttttaaacaaaacaacaaatcaacaacagcaacaacaacaacaaaaattaaaaacttttttctaaaaaaaaagtgaaaataaaaaaaattatatgcgcttcatgggactgagtcaccaccttcccttacatacttcagttcagattgtagccatacttaaaaaaaaaaaaaaagccaaaagatgatgacaacatttttatcagtattgtgaataaacttgaacacaaatacacgaagttccatgtcatgtcttcagttgtagaagtttttcctctttaaggtaaagcgaccaacttgaactttctctggcaacacgattcgcagttatataagggaatcagtgttcacgtctctgtatatatttatttatgtgtaatttaatgggaattgtaaatatggtgagtctgttttaagcctttttttttttatttatctgatcttgtttacctcttgtttagtgggttttgaatcttccctattagttcttcatgtggttcatggtactgatttagaaatccagtgtttgggggatttttttctctgggattcatgaatttagccctgttgtagcatgttaaaggtgacaaacagctggacaaatttttaaaaagtaaaataaaattttatctataattagtattattacatttagcttttcattgaaccgaaagaaaaaaagtgatattggaccctggaaagattttgaaacttgagtggtttgataacccttctatgtattgtagggagaaaaaaaaaagtttattttattccactgtcctcccttaaaagcatcatttgagcaataaatgaatattgtctttaaaccaagggttagggaattttcctctctctctctctctcctctctctttctgttcaaagaacttcaaacatttgggaccacctggtattctgtattttcactggccatattggaagcagttctagttgcattgtattgagttgtgctggcagtagtttccatgcctgtcaatgtatcatagtcctttgttgcccagataaataaatatttgatacgctttatgtcgatttttttttattcagtggctgtctttacccaggcgtatttttgttcttggcagtattttttattcagtatggttacagtaattgagtttaactctcccttggcaattgctccttgcaataagcagctgaacccattgtttccctcaagtataataaaaacttactttcaacttggagttcagagcagggtatcatttagatattccactgtgtctgtattcagacaaatgacacaataaaacccaatgtattcttttggataaaagattgtttgtactgctaaaggaatgacatactgtcttttccttactagaaacattaattttattattaaaaataaagttttattttattta

SEQ ID NO: 51 - DNA, 4872 bp, Homo sapiens
aacttgggacctgagttaggccttcatcgtcgcggactcagtagacagaggccataggtgcagctgtgatggtagaggtggaagactgatttgcattttcaccaggtgagacctggttactcattggttgatgaggaaagagatgatagccagggcggcataaaacggcaatgagctcagtaaacaacccccttcccgtgatcttcgtggcttcccgcccagacgtgtgaccaagatagcaaggagcagtctttaaggcgacacggcagagaggcagaaaaagatgggccttaccggttagttaagaaaaaaagaggacctgttgcctgtccctctagctttgaactacaaagtggaggggaagtttgtctggattttcctgtagaactgagggcaggacatgaggctctgcctgcagtcagcaacttggaatattcagacttcagaccagcatcacagattataaccctccgtaaatcatctgcatcccagctcccatcaaaagccagcctgaaggacccatggacacgtgactccagtgttctcaacaacatcttaagatcaagttggtttgcacaacatttgcatctacttgggacaaagcaagaacaataagggcaaaaaagtgaaaaaaaaaaaagatccctgagtaattgcaaatgctgggacagtttaccactccagggtgaagagtccataccaacatgtctgcctactacaggaataactggtctgaggaagacccagattaccctgactattcagggtctcagaaccgtacgcaggggtatttgaaaactcaaggttatccagatgttccaggtcctctgaacaatccagactaccccggcaccaggagcaatccatactctgtagcctccagaacacgtccagactatcctgggtctctggcagaaccaaattatcctagatctctgagtaatccagactattctggcaccagaagcaatgcatactctgcagcctctagaacaagcccagaccatcctacctctctaccagagccagattatagtgaatttcagagtcatccctaccaccgagcatcatccagacaaccagactaccctggatctcaacgaaatcctgattttgcaggctccagcagcagtggaaactatgcaggctccagaacacatccagatcattttggctccttagaaccggactaccctggagctcagagcaactctgatcatcctggacccagagccaatttgaaccatccaggatccagaaagaatctggaacatacaagttttagaatcaatccatacgcagactctctgggaaagcctgattatccaggcgctgacattcaacctaactctccacccttttttggggagccagactatcccagtgctgaggacaatcagaacttgccaagcacttggagagaacctgattattcagatgctgagaatggtcatgattatggctcttctgagaccccaaagatgaccaggggggtgctcagcagaacatcttcaatccagccctcatttcgtcacaggagtgatgaccccgtgggcagtctttggggagagaatgattaccctgaaggcattgaaatggcatccatggagatggcaaactcatatggccactctctgccaggtgctcctggaagtggctatgtgaaccctgcttatgtaggtgaaagtggtcctgtccatgcttatggaaacccaccattgtctgaatgtgattggcacaagtcaccccaaggacagaagttaatcgcatcccttatacccatgacatccagagacagaattaaagccatcaggaaccagccaaggaccatggaagagaaaaggaaccttaggaaaatagttgacaaagaaaaaagcaaacagacccatcgtatccttcagctcaattgctgtattcagtgtctgaactccatttcccgggcttatcggagatccaagaacagcctgtcggaaattctgaattccatcagcctgtggcagaagacgctgaagatcattggaggcaagtttggaaccagcgtcctctcctatttcaactttctgagatggcttttgaagttcaacattttctcattcatcctgaacttcagcttcatcataatccctcagtttaccgtggccaaaaagaacaccctccagttcactgggctggagtttttcactggggtgggttattttagggacacagtgatgtactatggcttttacaccaattccaccatccagcacgggaacagcggggcatcctacaacatgcagctggcctacatcttcacaatcggagcatgcttgaccacctgcttcttcagtttgctgttcagcatggccaagtatttccggaacaacttcattaatccccacatttactccggagggatcaccaagctgatcttttgctgggacttcactgtcactcatgaaaaagctgtgaagctaaaacagaagaatcttagcactgagataagggagaacctgtcagagctccgtcaggagaattccaagttgacgttcaatcagctgctgacccgcttctctgcctacatggtagcctgggttgtctctacaggagtggccatagcctgctgtgcagccgtttattacctggctgagtacaacttagagttcctgaagacacacagtaaccctggggcggtgctgttactgcctttcgttgtgtcctgcattaatctggccgtgccatgcatctactccatgttcaggcttgtggagaggtacgagatgccacggcacgaagtctacgttctcctgatccgaaacatctttttgaaaatatcaatcattggcattctttgttactattggctcaacaccgtggccctgtctggtgaagagtgttgggaaaccctcattggccaggacatctaccggctccttctgatggattttgtgttctctttagtcaattccttcctgggggagtttctgaggagaatcattgggatgcaactgatcacaagtcttggccttcaggagtttgacattgccaggaacgttctagaactgatctatgcacaaactctggtgtggattggcatcttcttctgccccctgctgccctttatccaaatgattatgcttttcatcatgttctactccaaaaatatcagcctgatgatgaatttccagcctccgagcaaagcctggcgggcctcacagatgatgactttcttcatcttcttgctctttttcccatccttcaccggggtcttgtgcaccctggccatcaccatctggagattgaagccttcagctgactgtggcccttttcgaggtctgcctctcttcattcactccatctacagctggatcgacaccctaagtacacggcctggctacctgtgggttgtttggatctatcggaacctcattggaagtgtgcacttctttttcatcctcaccctcattgtgctaatcatcacctatctttactggcagatcacagagggaaggaagattatgataaggctgctccatgagcagatcattaatgagggcaaagataaaatgttcctgatagaaaaattgatcaagctgcaggatatggagaagaaagcaaaccccagctcacttgttctggaaaggagagaggtggagcaacaaggctttttgcatttgggggaacatgatggcagtcttgacttgcgatctagaagatcagttcaagaaggtaatccaagggcctgatgactcttttggtaaccagacaccaatcaaataaggggaggagacgaaaatggaatgatttcttccatgccacctgtgcctttaggaactgcccagaagaaaatccaaggctttagccaggagcggaaactgactaccatgtaattatcaaagtaaaattgggcattccatgctatttttaatacctggattgctgatttttcaagacaaaatacttggggttttccaataaagattgttgtaatattgaaatgagcctacaaaaacctaggaagagataactagggaataatgtatattatcttcaagaagtgtgtgcaggaatgattggttcttagaaatctctcctgccagacttcccagacctggcaaaggtttagaaactgttgctaagaaaagtggtccatcctgaataaacatgtaatactccagcagggatatgaagcctctgaattgtagaacctgcatttatttgtgactttgaactaaagacatcccccatgtcccaaaggtggaatacaaccagaggtctcatctctgaactttcttgcgtactgattacatgagtctttggagtcggggatggaggaggttctgcccctgtgaggtgttatacatgaccatcaaagtcctacgtcaagctagctttgcagtggcagtaccgtagccaatgagatttatccgagacgcgattattgctaattggaaattttcccaataccccaccgtgatgacttgaaatataatcagcgctggcaatttttgacagtctctacggagactgaataagaaaaaagaaaagaaaagaaattagctgggtgcgatggcttatgcctgtaatcccggcactttgggaggctgaggcaagcggatcacttaatgtcaggagttcaagaccagcctggccaacatggtgaaaccccgtctctactaaaaataaaaaaactagctgggcgtggtggtacatgcctataatcccagctactcgggaggctgaggcaggagaattgcttgaacctgggaggcagaggttgcagtgaggcgagattgtaccactgcattccagcctgggcaacagtgagactctgcctcaaaaaaataaataaataaataaataaagtaaattaaaagtcttattcaaaccaaa

SEQ ID NO: 52 - DNA, 3685 bp, Homo sapiens
agtggactcacgcaggcgcaggagactacacttcccaggaactccgggccgcgttgttcgctggtacctccttctgacttccggtattgctgcggtctgtagggccaatcgggagcctggaattgctttcccggcgctctgattggtgcattcgactaggctgcctgggttcaaaatttcaacgatactgaatgagtcccgcggcgggttggctcgcgcttcgttgtcagatctgaggcgaggctaggtgagccgtgggaagaaaagagggagcagctagggcgcgggtctccctcctcccggagtttggaacggctgaagttcaccttccagcccctagcgccgttcgcgccgctaggcctggcttctgaggcggttgcggtgctcggtcgccgcctaggcggggcagggtgcgagcaggggcttcgggccacgcttctcttggcgacaggattttgctgtgaagtccgtccgggaaacggaggaaaaaaagagttgcgggaggctgtcggctaataacggttcttgatacatatttgccagacttcaagatttcagaaaaggggtgaaagagaagattgcaactttgagtcagacctgtaggcctgatagactgattaaaccacagaaggtgacctgctgagaaaagtggtacaaatactgggaaaaacctgctcttctgcgttaagtgggagacaatgtcacaagttaaaagctcttattcctatgatgccccctcggatttcatcaatttttcatccttggatgatgaaggagatactcaaaacatagattcatggtttgaggagaaggccaatttggagaataagttactggggaagaatggaactggagggctttttcagggcaaaactcctttgagaaaggctaatcttcagcaagctattgtcacacctttgaaaccagttgacaacacttactacaaagaggcagaaaaagaaaatcttgtggaacaatccattccgtcaaatgcttgttcttccctggaagttgaggcagccatatcaagaaaaactccagcccagcctcagagaagatctcttaggctttctgctcagaaggatttggaacagaaagaaaagcatcatgtaaaaatgaaagccaagagatgtgccactcctgtaatcatcgatgaaattctaccctctaagaaaatgaaagtttctaacaacaaaaagaagccagaggaagaaggcagtgctcatcaagatactgctgaaaagaatgcatcttccccagagaaagccaagggtagacatactgtgccttgtatgccacctgcaaagcagaagtttctaaaaagtactgaggagcaagagctggagaagagtatgaaaatgcagcaagaggtggtggagatgcggaaaaagaatgaagaattcaagaaacttgctctggctggaatagggcaacctgtgaagaaatcagtgagccaggtcaccaaatcagttgacttccacttccgcacagatgagcgaatcaaacaacatcctaagaaccaggaggaatataaggaagtgaactttacatctgaactacgaaagcatccttcatctcctgcccgagtgactaagggatgtaccattgttaagcctttcaacctgtcccaaggaaagaaaagaacatttgatgaaacagtttctacatatgtgccccttgcacagcaagttgaagacttccataaacgaacccctaacagatatcatttgaggagcaagaaggatgatattaacctgttaccctccaaatcttctgtgaccaagatttgcagagacccacagactcctgtactgcaaaccaaacaccgtgcacgggctgtgacctgcaaaagtacagcagagctggaggctgaggagctcgagaaattgcaacaatacaaattcaaagcacgtgaacttgatcccagaatacttgaaggtgggcccatcttgcccaagaaaccacctgtgaaaccacccaccgagcctattggctttgatttggaaattgagaaaagaatccaggagcgagaatcaaagaagaaaacagaggatgaacactttgaatttcattccagaccttgccctactaagattttggaagatgttgtgggtgttcctgaaaagaaggtacttccaatcaccgtccccaagtcaccagcctttgcattgaagaacagaattcgaatgcccaccaaagaagatgaggaagaggacgaaccggtagtgataaaagctcaacctgtgccacattatggggtgccttttaagccccaaatcccagaggcaagaactgtggaaatatgccctttctcgtttgattctcgagacaaagaacgtcagttacagaaggagaagaaaataaaagaactgcagaaaggggaggtgcccaagttcaaggcacttcccttgcctcattttgacaccattaacctgccagagaagaaggtaaagaatgtgacccagattgaacctttctgcttggagactgacagaagaggtgctctgaaggcacagacttggaagcaccagctggaagaagaactgagacagcagaaagaagcagcttgtttcaaggctcgtccaaacaccgtcatctctcaggagccctttgttcccaagaaagagaagaaatcagttgctgagggcctttctggttctctagttcaggaaccttttcagctggctactgagaagagagccaaagagcggcaggagctggagaagagaatggctgaggtagaagcccagaaagcccagcagttggaggaggccagactacaggaggaagagcagaaaaaagaggagctggccaggctacggagagaactggtgcataaggcaaatccaatacgcaagtaccagggtctggagataaagtcaagtgaccagcctctgactgtgcctgtatctcccaaattctccactcgattccactgctaaactcagctgtgagctgcggataccgcccggcaatgggacctgctcttaacctcaaacctaggaccgtcttgctttgtcattgggcatggagagaacccatttctccagacttttacctacccgtgcctgagaaagcatacttgacaactgtggactccagttttgttgagaattgttttcttacattactaaggctaataatgagatgtaactcatgaatgtctcgattagactccatgtagttacttcctttaaaccatcagccggccttttatatgggtcttcactctgactagaatttagtctctgtgtcagcacagtgtaatctctattgctattgccccttacgactctcaccctctccccactttttttaaaaattttaaccagaaaataaagatagttaaatcctaagatagagattaagtcatggtttaaatgaggaacaatcagtaaatcagattctgtcctcttctctgcataccgtgaatttatagttaaggatccctttgctgtgagggtagaaaacctcaccaactgcaccagtgaggaagaagactgcgtggattcatggggagcctcacagcagccacgcagcaggctctgggtggggctgccgttaaggcacgttctttccttactggtgctgataacaacagggaaccgtgcagtgtgcattttaagacctggcctggaataaatacgttttgtctttccctcaaaaaaaaaaaaaaaaaaaaaaa

SEQ ID NO: 53 - DNA, 3658 bp, Homo sapiens
aaggaggagtgcactggccgggatcggtgcagcgctcacactcactcacagtcactctctctgagcgcgtctcgctcgctctcatacacgcccggagcccaggagcgctcaggatcccgagcgccgcgaaaaagttcccccggcttttgctggagactcatcgttttgggaagtgcatttgcttcgtggctccgccgagcctgctgaatcctgtcctcgcggcacgggaccccgggatcgctgaccgctgccgccgccgcctctgcctcccggactatcggcagcctcggcaacaatagtggcggccgcccccagcgaggctccgggagcccttgcctgcgggggtccggggactcgagccggcctccgcctcccggacgcacagccagcgtggtccccgcgtgcaacgcgagcgccggggagtggctcctgctttgcccctcgtgggggccgagccaagaccagtctgcaaactccatcccgccggctggaagaagtcgcggagccggcaccaaacccgcagcgtcttcccgcgcggatcccgggacttaaaaagccggggccaccccggcccaggacgggatgcgggtcggtccggtgcgctctgccatgagcggcgcctcgcagccccgcggcccggccctgctcttcccagccacccgaggcgtcccggccaaacgcctgctggacgccgacgacgcggcggctgtggcggccaagtgcccgcgcctctccgagtgctccagccccccggactacctcagcccccccggctcgccctgcagcccgcagcccccgcctgccgctccgggggccggcggaggctccgggagcgcgccggggcccagccgcatcgccgactacctgctgctgcccctagccgagcgcgagcatgtgtcccgggcgctgtgcatccacactggacgcgagctgcgctgcaaggtgtttcccattaaacactaccaggacaaaatcaggccttacatccagctgccatcgcacagcaacattactggcattgtggaagtgatccttggggaaaccaaggcctatgtcttctttgagaaggactttggggacatgcactcctatgtgcgaagccggaagaggctgcgggaagaggaagccgcccggctcttcaagcagattgtctccgccgtcgcccactgccaccagtcagccatcgtgctgggggacctgaagcttaggaagttcgtcttctccacggaggagagaacccagcttagactagaaagtctagaagacacacacataatgaagggggaagatgatgctttgtcagacaaacatggctgcccagcctacgtgagccctgagatcctcaacaccactgggacctactccggaaaggctgcggacgtttggagcctgggggtgatgctctacacccttctggttggacgataccccttccatgactcagaccccagtgcccttttctccaaaattcggcgtggacagttctgcattcctgagcacatttcccccaaagccaggtgcctcattcgcagcctcttgagacgggagccctccgagagactcactgcccccgagatcctactgcacccctggtttgagtccgtcttggaacccgggtacatcgactcagaaataggaacttcagaccagattgttccagagtaccaggaggacagtgacattagttccttcttctgctaatccccaaaacctcagaaacctcataattcttaacacctggcatttccatttctaaagatggacaggccctttggcgtggtaccaaccagataatgactgcatcaggatgaaagctgctgaactcggcatggcgcctcctcttctctgttgggatgagtgactttattgatttgagcagcatatgctgtgattggctgccctgcaaatttgtttcccttaaggaaccctcaccaactatctctgctggatttgggagttccgcatcttttgtggagggcagagtatggacatcttacacccggtggtcaagtgtgtaataaacttgagcattcgaatgggagaaaaagcaaatcgcacaatgacatattttgagtaataaccgtatttttcacagggtgacaaattgggccaataaatctgccatctttgaactcatctttggtggctagactgctacggcagcttctctgatgggaaagttccttttttggcttaacactcaccctttcttcacactcacatttaccaatgactctgctccgtttttggagcagactgttttaagttgctcaggagcctgatggaaccatgaaccgagactcttctctgtttcctgccaagacctcatctgcactaatgccttctccctgaccttgacacttccccctttagctataaaagcacttaccagccgaacgtggaacagtatcacaaaagattccatctcccaacgatttcagaactctgagctcagagagactccagattttaaaaaataatttgagtgcttggaaactattagctttttaagttccttccaaatatgttagtacctaccctttactttttccccaagaccatctcagggtggagcattctgtctaagagaagaaagataaggaggctcccacccacctctcccaagagcagacattaaacatctttgtgctttgaagagagtgaattttggatagtcttgtgattctcagactaacttccagaattatactttaacccctcccagatatggtccgcctttggcattgtgtgtacatctgcagttttgcatggtgggttgttaatatttcaaatgtgtggtttatgaatacgtctgtataatcggcttctggagtgaaacagcaaaccccaaatcttcaaagttggaaggaactttaaaaatcatccggtccaatctctttcctctttctgccacctcccaaggcagaaatcccctcttcagcttcttttgtaggtgggaatccagcctctgttagatatgtccagagatggaaactcactcccctacaaaagatggagcttaatggagaaattgcaactttcattaaaaaacaaattcagatgaaatatcagtaactgtcttggacagtgctgaaatcaggtggttaaacgggtaaacaaaatatactgtattttgagaaatggcacaaaaacaggcagtcatctttaagggctatgcctaggcaaactactaacatgcattgtgagaatgccgtgtatacctcacgtactgtgtactttgtacatatattttaccttttatacctatgttcgattttgttttgttttgttttgttctggctttgaggcttgttttgttgtctgtgtctgtctgaataacctgcgtgtctaaaaccacgtgaaatgtgaatgattattggcaatattaccttgacagaatcatgggactttgagaagagggaggacagaggcctctgtcgcactaacgctctcgtggttgctcgactgttgtatctgtgatacattatccgactaaggactctgggctggcagggccttctgccgggaaagctagaaacactaggttcttcctgtacatacgtgtatatatgtgaacagtgagatggccgtttctgacttgtagagaaattttaataaacctggtttcgtaaaaaaaaaaaaaaaaaaaaaaaaaaaa

SEQ ID NO: 54 - DNA, 1912 bp, Homo sapiens
aggggctgggcggggctcgggctcctgctccggctcagctgcggcggccgcaggttccaaagcgggtccgagccgccgccgcgcgcgcgccgcgcactgcagccccaggccccggccccccacccacgtctgcgttgctgccccgcctgggccaggccccaaaggcaaggacaaagcagctgtcagggaacctccgccggagtcgaatttacgtgcagctgccggcaaccacaggttccaagatggtttgcgggggcttcgcgtgttccaagaactgcctgtgcgccctcaacctgctttacaccttggttagtctgctgctaattggaattgctgcgtggggcattggcttcgggctgatttccagtctccgagtggtcggcgtggtcattgcagtgggcatcttcttgttcctgattgctttagtgggtctgattggagctgtaaaacatcatcaggtgttgctatttttttatatgattattctgttacttgtatttattgttcagttttctgtatcttgcgcttgtttagccctgaaccaggagcaacagggtcagcttctggaggttggttggaacaatacggcaagtgctcgaaatgacatccagagaaatctaaactgctgtgggttccgaagtgttaacccaaatgacacctgtctggctagctgtgttaaaagtgaccactcgtgctcgccatgtgctccaatcataggagaatatgctggagaggttttgagatttgttggtggcattggcctgttcttcagttttacagagatcctgggtgtttggctgacctacagatacaggaaccagaaagacccccgcgcgaatcctagtgcattcctttgatgagaaaacaaggaagatttcctttcgtattatgatcttgttcactttctgtaattttctgttaagctccatttgccagtttaaggaaggaaacactatctggaaaagtaccttattgatagtggaattatatatttttactctatgtttctctacatgtttttttctttccgttgctgaaaaatatttgaaacttgtggtctctgaagctcggtggcacctggaatttactgtattcattgtcgggcactgtccactgtggcctttcttagcatttttacctgcagaaaaactttgtatggtaccactgtgttggttatatggtgaatctgaacgtacatctcactggtataattatatgtagcactgtgctgtgtagatagttcctactggaaaaagagtggaaatttattaaaatcagaaagtatgagatcctgttatgttaagggaaatccaaattcccaattttttttggtctttttaggaaagattgttgtggtaaaaagtgttagtataaaaatgataatttacttgtagtcttttatgattacaccaatgtattctagaaatagttatgtcttaggaaattgtggtttaatttttgacttttacaggtaagtgcaaaggagaagtggtttcatgaaatgttctaatgtataataacatttaccttcagcctccatcagaatggaacgagttttgagtaatcaggaagtatatctatatgatcttgatattgttttataataatttgaagtctaaaagactgcatttttaaacaagttagtattaatgcgttggcccacgtagcaaaaagatatttgattatcttaaaaattgttaaataccgttttcatgaaatttctcagtattgtaacagcaacttgtcaaacctaagcatatttgaatatgatctcccataatttgaaattgaaatcgtattgtgtggctctgtatattctgttaaaaaattaaaggacagaaacctttctttgtgtatgcatgtttgaattaaaagaaagtaatggaagaattgatcgatgaaaaaaaaaaaa

SEQ ID NO: 55 - DNA, 2264 bp, Homo sapiens
ggtctccttggcatgcacctattcagactgttagtattatgtatttacttcaaattttagcagttatattttaacttgattgatttttcctcagatataagtatgagaaatgacagaaagaaacaacaactggaaaagaagcattgcataagaccaggatgtctctgaaatggacgtcagtctttctgctgatacagctcagttgttactttagctctggaagctgtggaaaggtgctagtgtggcccacagaatacagccattggataaatatgaagacaatcctggaagagcttgttcagaggggtcatgaggtgactgtgttgacatcttcggcttctactcttgtcaatgccagtaaatcatctgctattaaattagaagtttatcctacatctttaactaaaaattatttggaagattctcttctgaaaattctcgatagatggatatatggtgtttcaaaaaatacattttggtcatatttttcacaattacaagaattgtgttgggaatattatgactacagtaacaagctctgtaaagatgcagttttgaataagaaacttatgatgaaactacaagagtcaaagtttgatgtcattctggcagatgcccttaatccctgtggtgagctactggctgaactatttaacataccctttctgtacagtcttcgattctctgttggctacacatttgagaagaatggtggaggatttctgttccctccttcctatgtacctgttgttatgtcagaattaagtgatcaaatgattttcatggagaggataaaaaatatgatacatatgctttattttgacttttggtttcaaatttatgatctgaagaagtgggaccagttttatagtgaagttctaggaagacccactacattatttgagacaatggggaaagctgaaatgtggctcattcgaacctattgggattttgaatttcctcgcccattcttaccaaatgttgattttgttggaggacttcactgtaaaccagccaaacccctgcctaaggaaatggaagagtttgtgcagagctctggagaaaatggtattgtggtgttttctctggggtcgatgatcagtaacatgtcagaagaaagtgccaacatgattgcatcagcccttgcccagatcccacaaaaggttctatggagatttgatggcaagaagccaaatactttaggttccaatactcgactgtacaagtggttaccccagaatgaccttcttggtcatcccaaaaccaaagcttttataactcatggtggaaccaatggcatctatgaggcgatctaccatgggatccctatggtgggcattcccttgtttgcggatcaacatgataacattgctcacatgaaagccaagggagcagccctcagtgtggacatcaggaccatgtcaagtagagatttgctcaatgcattgaagtcagtcattaatgaccctgtctataaagagaatgtcatgaaattatcaagaattcatcatgaccaaccaatgaagcccctggatcgagcagtcttctggattgagtttgtcatgcgccacaaaggagccaagcaccttcgagtcgcagctcacaacctcacctggatccagtaccactctttggatgtgatagcattcctgctggcctgcgtggcaactgtgatatttatcatcacaaaattttgcctgttttgtttccgaaagcttgccaaaaaaggaaagaagaagaaaagagattagttatatcaaaagcctgaagtggaatgactgaaagatgggactcctcctttatttcagcatggagggttttaaatggaggatttcctttttcctgtgacaaaacatcttttcacaacttaccttgttaagacaaaatttattttccagggatttaatacgtactttagctgaattattctatgtcaatgatttttaagctatgaaaaatacaatggggggaaggatagcatttggagatatacctaatgttaaatgacgagttactggatgcagcacgccaacatggcacatgtatacatatgtagctaacctgcacgttgtgcacatgtaccctaaaacttaaagtataatttaaaaaaagcaaaaaaaaaaaatacaactcttttttttaaaccaggaaggaaaatgtgaacatggaaacaacttctagtattggatctgaaaataaagtgtcatccaagccataaaaaaaaaagaaaagaaaaataaaaataatataaaaccttaaaaaaa

SEQ ID NO: 56 - DNA, 3223 bp, Homo sapiens
tcaatcccttaattaaatagcttcccctctacaggcttttgaagtggtagcagttcctcctaactcctgccagaaacagctctcctcaacatgagagctgcacccctcctcctggccagggcagcaagccttagccttggcttcttgtttctgctttttttctggctagaccgaagtgtactagccaaggagttgaagtttgtgactttggtgtttcggcatggagaccgaagtcccattgacacctttcccactgaccccataaaggaatcctcatggccacaaggatttggccaactcacccagctgggcatggagcagcattatgaacttggagagtatataagaaagagatatagaaaattcttgaatgagtcctataaacatgaacaggtttatattcgaagcacagacgttgaccggactttgatgagtgctatgacaaacctggcagccctgtttcccccagaaggtgtcagcatctggaatcctatcctactctggcagcccatcccggtgcacacagttcctctttctgaagatcagttgctatacctgcctttcaggaactgccctcgttttcaagaacttgagagtgagactttgaaatcagaggaattccagaagaggctgcacccttataaggattttatagctaccttgggaaaactttcaggattacatggccaggacctttttggaatttggagtaaagtctacgaccctttatattgtgagagtgttcacaatttcactttaccctcctgggccactgaggacaccatgactaagttgagagaattgtcagaattgtccctcctgtccctctatggaattcacaagcagaaagagaaatctaggctccaagggggtgtcctggtcaatgaaatcctcaatcacatgaagagagcaactcagataccaagctacaaaaaactcatcatgtattctgcgcatgacactactgtgagtggcctacagatggcgctagatgtttacaacggactccttcctccctatgcttcttgccacttgacggaattgtactttgagaagggggagtactttgtggagatgtactatcggaatgagacgcagcacgagccgtatcccctcatgctacctggctgcagccccagctgtcctctggagaggtttgctgagctggttggccctgtgatccctcaagactggtccacggagtgtatgaccacaaacagccatcaaggtactgaagacagtacagattagtgtgcacagagatctctgtagaaggagtagctgccctttctcagggcagatgatgctttgagaacatactttggccattacccccagctttgaggaaaatgggctttggatgattattttatgttttagggacccccaacctcaggcaattcctacctcttcacctgaccctgcccccacttgccataaaacttagctaagttttgttttgtttttcagcgttaatgtaaaggggcagcagtgccaaaatataatcagagataaagcttaggtcaaagttcatagagttcccatgaactatatgactggccacacaggatcttttgtatttaaggattctgagattttgcttgagcaggattagataaggctgttctttaaatgtctgaaatggaacagatttcaaaaaaaaaccccacaatctaggatgggaacaaggaaggaaagatgtgaataggctgatgggcaaaaaaccaatttacccatcagttccagccttctctcaaggagaggcaaagaaaggagatacagtggagacatctggaaagttttctccactggaaaactgctactatctgtttttatatttctgttaaaatatatgaggctacagaactaaaaattaaaacctctttgtgtcccttggtcctggaacatttatgttccttttaaagaaacaaaaatcaaactttacagaaagatttgatgtatgtaatacatatagcagctcttgaagtatatatatcatagcaaataagtcatctgatgagaacaagctatttgggcacaacacatcaggaaagagagcaccacgtgatggagtttctctagaagctccagtgataagagatgttgactctaaagttgatttaaggccaggcatggtggtttacgcctataatcccagcattttgggagtccgaggtgggcagatcacttgagctcaggaggtcaagatcagcctgggcaacatggtgaaacctggtctctacataaaatacaaaaacttagatgggcatggtggtgtgtgcctatagtcccactacttgtggggctaaggcaggaggatcacttgagccccggaggtcgaggctacagtgagccaagagtgcactactgtactccagccagggcaagagagcgagaccctgtctcaataaataaataaataaataaataaataaataaataaataaataaaaacaaagttgattaagaaaggaagtataggccaggcacagtggctcacacctgtaatccttgcattttggaaggctgaggcaggaggatcactttaggcctggtgtgttcaagaccagcctggtcaacatagtgagacactgtctctaccaaaaaaaggaaggaagggacacatatcaaactgaaacaaaattagaaatgtaattatgttctaagtgcctccaagttcaaaacttattggaatgttgagagtgtggttacgaaatacgttaggaggacaaaaggaatgtgtaagtctttaatgccgatatcttcagaaaacctaagcaaacttacaggtcctgctgaaactgcccactctgcaagaagaaatcatgatatagctttgccatgtggcagatctacatgtctagagaacactgtgctctattaccattatggataaagatgagatggtttctagagatggtttctactggctgccagaatctagagcaaagccatccccgctcctggttggtcacagaatgactgacaaagacatcgattgatatgcttctttgtgttatttccctcccaagtaaatgtttgtccttgggtccattttctatgcttgtaactgtcttctagcagtgagccaaatgtaaaatagtgaataaagtcattattaggaagttcaaaagcattgcttttataatgaacttagaaaaacgtatgtgtgtgtgtttaattagaataaaattcctctaggcagatttcaggagctccaaaa

SEQ ID NO: 57 - DNA, 1278 bp, Homo sapiens
ccattggcctgtagattcacctcccctgggcagggccccaggacccaggataatatctgtgcctcctgcccagaaccctccaagcagacacaatggtaagaatggtgcctgtcctgctgtctctgctgctgcttctgggtcctgctgtcccccaggagaaccaagatggtcgttactctctgacctatatctacactgggctgtccaagcatgttgaagacgtccccgcgtttcaggcccttggctcactcaatgacctccagttctttagatacaacagtaaagacaggaagtctcagcccatgggactctggagacaggtggaaggaatggaggattggaagcaggacagccaacttcagaaggccagggaggacatctttatggagaccctgaaagacatcgtggagtattacaacgacagtaacgggtctcacgtattgcagggaaggtttggttgtgagatcgagaataacagaagcagcggagcattctggaaatattactatgatggaaaggactacattgaattcaacaaagaaatcccagcctgggtccccttcgacccagcagcccagataaccaagcagaagtgggaggcagaaccagtctacgtgcagcgggccaaggcttacctggaggaggagtgccctgcgactctgcggaaatacctgaaatacagcaaaaatatcctggaccggcaagatcctccctctgtggtggtcaccagccaccaggccccaggagaaaagaagaaactgaagtgcctggcctacgacttctacccagggaaaattgatgtgcactggactcgggccggcgaggtgcaggagcctgagttacggggagatgttcttcacaatggaaatggcacttaccagtcctgggtggtggtggcagtgcccccgcaggacacagccccctactcctgccacgtgcagcacagcagcctggcccagcccctcgtggtgccctgggaggccagctaggaagcaagggttggaggcaatgtgggatctcagacccagtagctgcccttcctgcctgatgtgggagctgaaccacagaaatcacagtcaatggatccacaaggcctgaggagcagtgtggggggacagacaggaggtggatttggagaccgaagactgggatgcctgtcttgagtagacttggacccaaaaaatcatctcaccttgagcccacccccaccccattgtctaatctgtagaagctaataaataatcatccctccttgcctagcataaaaaaaaaaaaaaa

SEQ ID NO: 58 - DNA, 3012 bp, Homo sapiens
ggcaggaacactggcagggcagcctgctgtcggcttagaggggatgggcagtgtggagggcctggcagagcaagaggactcatccttccaaagggactttctctgggaagcctgctcctcgggccactgcgaaccctctctactctccgaagggaattgtccttcctggcttccactacttccacccctgaatgcacaggcagcccggcccaagtctcccactagggatgcagatggattcggtgtgaagggctggctgctgttgcctccggctcttgaaagtcaagttcagaggcgtgcaaagactccagaattggaggcatgatgaagactctgctgctgtttgtggggctgctgctgacctgggagagtgggcaggtcctgggggaccagacggtctcagacaatgagctccaggaaatgtccaatcagggaagtaagtacgtcaataaggaaattcaaaatgctgtcaacggggtgaaacagataaagactctcatagaaaaaacaaacgaagagcgcaagacactgctcagcaacctagaagaagccaagaagaagaaagaggatgccctaaatgagaccagggaatcagagacaaagctgaaggagctcccaggagtgtgcaatgagaccatgatggccctctgggaagagtgtaagccctgcctgaaacagacctgcatgaagttctacgcacgcgtctgcagaagtggctcaggcctggttggccgccagcttgaggagttcctgaaccagagctcgcccttctacttctggatgaatggtgaccgcatcgactccctgctggagaacgaccggcagcagacgcacatgctggatgtcatgcaggaccacttcagccgcgcgtccagcatcatagacgagctcttccaggacaggttcttcacccgggagccccaggatacctaccactacctgcccttcagcctgccccaccggaggcctcacttcttctttcccaagtcccgcatcgtccgcagcttgatgcccttctctccgtacgagcccctgaacttccacgccatgttccagcccttccttgagatgatacacgaggctcagcaggccatggacatccacttccatagcccggccttccagcacccgccaacagaattcatacgagaaggcgacgatgaccggactgtgtgccgggagatccgccacaactccacgggctgcctgcggatgaaggaccagtgtgacaagtgccgggagatcttgtctgtggactgttccaccaacaacccctcccaggctaagctgcggcgggagctcgacgaatccctccaggtcgctgagaggttgaccaggaaatacaacgagctgctaaagtcctaccagtggaagatgctcaacacctcctccttgctggagcagctgaacgagcagtttaactgggtgtcccggctggcaaacctcacgcaaggcgaagaccagtactatctgcgggtcaccacggtggcttcccacacttctgactcggacgttccttccggtgtcactgaggtggtcgtgaagctctttgactctgatcccatcactgtgacggtccctgtagaagtctccaggaagaaccctaaatttatggagaccgtggcggagaaagcgctgcaggaataccgcaaaaagcaccgggaggagtgagatgtggatgttgcttttgcacctacgggggcatctgagtccagctccccccaagatgagctgcagccccccagagagagctctgcacgtcaccaagtaaccaggccccagcctccaggcccccaactccgcccagcctctccccgctctggatcctgcactctaacactcgactctgctgctcatgggaagaacagaattgctcctgcatgcaactaattcaataaaactgtcttgtgagctgatcgcttggagggtcctctttttatgttgagttgctgcttcccggcatgccttcattttgctatggggggcaggcaggggggatggaaaataagtagaaacaaaaaagcagtggctaagatggtatagggactgtcataccagtgaagaataaaagggtgaagaataaaagggatatgatgacaaggttgatccacttcaagaattgcttgctttcaggaagagagatgtgtttcaacaagccaactaaaatatattgctgcaaatggaagcttttctgttctattataaaactgtcgatgtattctgaccaaggtgcgacaatctcctaaaggaatacactgaaagttaaggagaagaatcagtaagtgtaaggtgtacttggtattataatgcataattgatgttttcgttatgaaaacatttggtgcccagaagtccaaattatcagttttatttgtaagagctattgcttttgcagcggttttatttgtaaaagctgttgatttcgagttgtaagagctcagcatcccaggggcatcttcttgactgtggcatttcctgtccaccgccggtttatatgatcttcatacctttccctggaccacaggcgtttctcggcttttagtctgaaccatagctgggctgcagtaccctacgctgccagcaggtggccatgactacccgtggtaccaatctcagtcttaaagctcaggcttttcgttcattaacattctctgatagaattctggtcatcagatgtactgcaatggaacaaaactcatctggctgcatcccaggtgtgtagcaaagtccacatgtaaatttatagcttagaatattcttaagtcactgtcccttgtctctctttgaagttataaacaacaaacttaaagcttagcttatgtccaaggtaagtattttagcatggctgtcaaggaaattcagagtaaagtcagtgtgattcacttaatgatatacattaattagaattatggggtcagaggtatttgcttaagtgatcataattgtaaagtatatgtcacattgtcacattaatgtcacactgtttcaaaagttaaaaaaaaaaaaaaaaaa

SEQ ID NO: 59 - DNA, 1970 bp, Homo sapiens
ggagggcagcaccgccgggcttcgcgccatgacatcagccctggagtggtgcagtgtgcaaagcccactggttggcgtggcccgggacacgccttccgcggagcggaacaaaacggcgcgcaggccgggcgcacccagccgccacttccgagagcgcctgccgcccctgcgccgccgagccagctgccagaatgccgaactggggaggaggcaagaaatgtggggtgtgtcagaagacggtttactttgccgaagaggttcagtgcgaaggcaacagcttccataaatcctgcttcctgtgcatggtctgcaagaagaatctggacagtaccactgtggccgtgcatggtgaggagatttactgcaagtcctgctacggcaagaagtatgggcccaaaggctatggctacgggcagggcgcaggcaccctcagcactgacaagggggagtcgctgggtatcaagcacgaggaagcccctggccacaggcccaccaccaaccccaatgcatccaaatttgcccagaagattggtggctccgagcgctgcccccgatgcagccaggcagtctatgctgcggagaaggtgattggtgctgggaagtcctggcataaggcctgctttcgatgtgccaagtgtggcaaaggccttgagtcaaccaccctggcagacaaggatggcgagatttactgcaaaggatgttatgctaaaaacttcgggcccaagggctttggttttgggcaaggagctggggccttggtccactctgagtgaggccaccatcacccaccacaccctgcccactcctgcgcttttcatcgccattccattcccagcagctttggagacctccaggattatttctctgtcagccctgccacatatcactaatgacttgaacttgggcatctggctccctttggtttgggggtctgcctgaggtcccaccccactaaagggctccccaggcctgggatctgacaccatcaccagtaggagacctcagtgttttgggtctaggtgagagcaggcccctctccccacacctcgccccacagagctctgttcttagcctcctgtgctgcgtgtccatcatcagctgaccaagacacctgaggacacatcttggcacccagaggagcagcagcaacaggctggagggagagggaagcaagaccaagatgaggaggggggaaggctgggttttttggatctcagagattctcctctgtgggaaagaggttgagcttcctggtgtccctcagagtaagcctgaggagtcccagcttagggagtcactattggaggcagagaggcatgcaggcagggtcctaggagcccctgcttctccaggcctcttgcctttgagtctttgtggaatggatagcctcccactaggactgggaggagaataacccaggtcttaaggaccccaaagtcaggatgttgtttgatcttctcaaacatctagttccctgcttgatgggaggatcctaatgaaatacctgaaacatatattggcatttatcaatggctcaaatcttcatttatctctggccttaaccctggctcctgaggctgcggccagcagagcccaggccagggctctgttcttgccacacctgcttgatcctcagatgtggagggaggtaggcactgcctcagtcttcatccaaacacctttccctttgccctgagacctcagaatcttccctttaacccaagaccctgcctcttccactccacccttctccagggacccttagatcacatcactccacccctgccaggccccaggttaggaatagtggtgggaggaaggggaaagggctgggcctcaccgctcccagcaactgaaaggacaacactatctggagccacccactgaaagggctgcaggcatgggctgtacccaagctgatttctcatctggtcaataaagctgtttagaccagaaaaaaaaaaaaaaaa

SEQ ID NO: 60 - DNA, 4412 bp, Homo sapiens
gcgccgctgctcgaggaaacgctttcggccgggagctgcggccgccgccagcagttttcatgtttgggattcaggagaatattccgcgcggggggacgaccatgaaggaggagccgctgggcagcggcatgaacccggtgcgctcgtggatgcacacggcgggcgtggtggacgccaacacggccgcccagagcggcgtggggctggcgcgggcgcacttcgagaagcagccgccttccaacctccggaaatccaatttcttccacttcgtgctggcgctctacgataggcaggggcagccggtggagattgaaaggaccgcttttgtggactttgtggagaaagagaaagagccaaacaacgagaaaaccaacaacggcatccactataaactccagttattgtacagcaacggagtcagaacagagcaagatctgtatgttcgcctcatagattcaatgaccaaacaggccatcgtctacgagggccaggacaagaacccggagatgtgccgtgtgctgctgacccacgagatcatgtgcagccggtgctgtgacaagaaaagttgtggcaatagaaacgaaacgccctcagaccctgtaatcattgacagattctttctaaagtttttcctcaagtgcaatcagaactgtttgaagaatgcaggcaaccctcgagatatgcggagattccaggttgttgtatcgacaacagtcaacgtggacggccacgtgctggccgtgtcagacaacatgtttgtgcacaacaattccaaacacgggaggcgggcccgccgcctagacccgtcagaagccactccgtgcatcaaggccatcagtcccagtgaaggctggaccacggggggtgccaccgtcatcataattggcgacaacttctttgacgggctgcaagttgtattcggaactatgttggtgtggagcgagctgataactccccatgccatccgagtccagaccccgccgaggcacattcctggcgtcgtcgaagtgaccctctcctacaaatccaagcagttctgcaaaggtgctcctgggcgctttgtctacaccgcccttaatgaaccaaccatagattacggctttcagaggttgcagaaagtgatcccaagacatccgggtgatcccgaaaggttacccaaggaggtgttactgaagcgggcggcggacctggtggaagccttatacggaatgcctcacaacaaccaggagatcatcttgaagcgagcggcggacatcgccgaggcgctgtacagcgttccccgcaatcacaaccagatccccaccctgggcaacaaccctgcacacacgggcatgatgggcgtcaactccttcagcagccagctagccgtcaacgtgtcagagacgtcacaagccaacgaccaagtcggctacagtcgcaatacaagcagcgtgtccccgcgaggctacgtccccagcagtactccccagcagtccaattacaacacagtcagcactagcatgaatggatatggaagtggcgccatggccagtctaggggtccctggctcgcctggatttcttaatggctcctccgctaactctccctacggcatgaaacagaagagcgccttcgcgcccgtggtccggccccaagcctctcctcctccttcctgcaccagcgccaacgggaatggactgcaagctatgtctgggctggtagtcccgccaatgtgagggacttctgtttaccttccgcagcacccagcatcaaaggacggacttcaggggacacgtttagtatattaagacatgctgatggaaacagtatcttcaaaaaaatcagcagcaattgaaatgctacaaaagactttgtttaaagattttatttaaactattaagaatcaacatgcaaacagcctacttcttcatgaacaattccattttattgactgaacttttctcatattttcacatttctcagtcctgaagaataaggaaaacaaagcgacgcctattttgtataaagtttccgactccgtcttggccatgtctagtaattgctatgtgttgggagaaactttgtgaatgcaccattttgatgatcatgaaacgctgatgaaaaatgcctccaaacatttttctgtactcatacttagattcacaatggttgtgtatctctataatgtgaaatatttttttgtggtgataaaaagagggccaaggaggtatgagccatcagactggaaaaaaggatgactatatgatgaggagaaactggggtggcagggagggagggagggtttatcactgcttaacttcatcttcatgaaatgaaactttgtaacttattgtagttagaaattgtaactttgatattgaattctcttgccttcaacaagcacactgacagagaaaaaatgctactgtctgttggttccaatattctcccactgctagagcttcctgttaagcaagtgtgatctgcaacattttttcaacttttgctagcactgtatactattgcattcttaggctactgtgaggtctatgtttcttgtaccagaaattgtccttttgacttctagatccttcttccctaatgtgttttgtatgtggttataaaattgtagacttttgtgattttgccaaagttgtagctaaatatttatacacttgtcttgaatttttttcagatccacttaaaatatttagaaaaacaagttttattccttatgtgtcttataaggaataaaatggtcttcatttgacacttactttcccatgaacacttgcagttgctaagggactttattttgtaacatatcaattataaatattgtatttatctttgaaattttgtacattgcttttcccaccttttcctttttcttctttcttgtctgtattggtttttgatcacggcctggtgttgtgatactgggaagagcattagccaagaacttgtctctttgatctgtttcgttaagctgaaccagtgtctttacatttcatttgtacttcaaaaaatatgctattgtttagactttccatcctttttttttttattttgaggaaaagtcaaattcattgtttatttttatattatttttaagttatctgaacaaatacttttgaaaaaaaagtttgttgtatagtcaaaacaaatcggtgccacccggccgtgacaaatcctagtagattctgtgcatgtggagcggccgcgaagaggtgacaccgtttggggctgtgtccttattttattttatttttttgtagaatgtaaaaagtcattttagatgccacccattgactttgccacatagctgaactgtgtttactggaaaaattcagaggcctaaagtttaaaataaaatttacttctgatgttttaattaaaatgtttgccacattaacttttctgatgccttaaaagtgaacttctttaaagaacctttgtgctattttatcacaggcttacactacaattgttaataaatacttcatttggagatgtatggtgtaaaacacacaaacacacacaaaaaagcacaagcccgctgcatgacccgtctctcctttctgggactatttctgctgcgtcctgcaccctcctgggcccacctccgattcacagaggtttcagggggacccaaatcactgctggttttcaatttttttttaacaatacatttttgtggtcagttccaacagcactgtccgtacttttaaaactggaatgacctccttcagatatcgtgcctcttagtgccaaacccacagtgagaccaaaagtgtcaggtgtttttttttttttctttctcctttgcactaagtgctttgcagacacggcacagcaaacattttgcaaactgcagcagaaatcgaatttaaaacaaaaaggagggactttaaaataccttcttgacaaaaatcaacaatgcacaacttacaaagtgttcattctagggacaaaattaaataaacagaatgtccccaggagtcagcaggtcacagtctggctttgtgatggttgacaaggtctagctacatgggaaagcctgagaagtcactttggaactaaattgcctccattttattttgtacgagtaagggtttgatctacaaaagagctcacatggacgcactgagaacgcctgccagcttccccatgccctcacttggtttgtgttttaggttaagtagtcaatgcccacatcacttcactgtctcaagactgagcacttcactaaatggtagattttactgttaaagaccctacaataagattgttttatctgtacattttttcagatatttaactgtataaaaatgttcattttacacaatatttaattaaagtatttcttgtctgtgaatttcacttttggtaattttctctgtttttgattattaaaatgactaaacactaac

SEQ ID NO: 61 - DNA, 1727 bp, Homo sapiens
aaagtgaggtccctttctggtgctggtggccttcccagtttagccaccctttggattcctggaaaatatgaggcctcgtgtgtccttgaagcaggcaggacaaacgaggacatggcagccccttcccatctgggagctgaggcttctttaatctggagaccttaaaaggcacgtgggagccaggggctgggttcttatctcctaggcctggccaatgtccagacgtgccttatttatagcgccactgacaagggcagcgcagctggctggcagctgcacagaaggttggggccatccaaccaggcagtccgcctgcacagcagctgtccctgctcatcgggctggaggacagaagacagaaccctaaaaccacaggttgctgaaaagccaggagtcaaaatgactgagcgctttgactgccaccattgcaacgaatctctctttggcaagaagtacatcctgcgggaggagagcccctactgcgtggtgtgctttgagaccctgttcgccaacacctgcgaggagtgtgggaagcccatcggctgtgactgcaaggacttgtcttacaaggaccggcactggcatgaagcctgtttccactgctcgcagtgcagaaactcactggtggacaagccctttgctgccaaggaggaccagctgctctgtacagactgctattccaacgagtactcatccaagtgccaggaatgcaagaagaccatcatgccaggtacccgcaagatggagtacaagggcagcagctggcatgagacctgcttcatctgccaccgctgccagcagccaattggaaccaagagtttcatccccaaagacaatcagaatttctgtgtgccctgctatgagaaacaacatgccatgcagtgcgttcagtgcaaaaagcccatcaccacgggaggggtcacttaccgggagcagccctggcacaaggagtgcttcgtgtgcaccgcctgcaggaagcagctgtctgggcagcgcttcacagctcgcgatgactttgcctactgcctgaactgcttctgtgacttgtatgccaagaagtgtgctgggtgcaccaaccccatcagcggacttggtggcacaaaatacatctcctttgaggaacggcagtggcataacgactgctttaactgtaagaagtgctccctctcactggtggggcgtggcttcctcacagagagggacgacatcctgtgccccgactgtgggaaagacatctgaattcaacacagagaagttgctgcttgtgatctcacacacagatttttatgttttctttctcacccaggcaatcttgccttctggtttcttccagccacattgagactttcttctagtgcttttcagtgatactcacgtttgcttaaaccctttagtgctttgtgatagttcagtcccagggaaagagaaaactcgccctaggccctaggtgggaagatggtttgaaatttttgtaatcgagtaaggcacacccaaatgtaaaaatccttttgaatgatgcctttataaatctttctctcactgtctatttaagtgcaattaacatatgtcacgaacttgaaagttttctaaactcaataaggtaatgaccagttgttatttacagctctgtaacctcccgttgcgtcaagtctaaaccaagattatgtgacttgcaataaagttattcagaacagaaaaaaaaaaaaaaaaaaaaaaaaaaaaaaaaa

SEQ ID NO: 62 - DNA, 8533 bp, Homo sapiens
attcgcgtggaggcgcgtcgcgcgcagcggacgccgacagaatccccgaggcgcctggcgcgggcgcgggcgcgaaggcgatccgggcgccaccccgcggtcatcggtcaccggtcgctctcaggaacagcagcgcaacctctgctccctgcctcgcctcccgcgcgcctaggtgcctgcgactttaattaaagggccgtcccctcgccgaggctgcagcaccgcccccccggcttctcgcgcctcaaaatgagtagctcccactctcgggcgggccagagcgcagcaggcgcggctccgggcggcggcgtcgacacgcgggacgccgagatgccggccaccgagaaggacctggcggaggacgcgccgtggaagaagatccagcagaacactttcacgcgctggtgcaacgagcacctgaagtgcgtgagcaagcgcatcgccaacctgcagacggacctgagcgacgggctgcggcttatcgcgctgttggaggtgctcagccagaagaagatgcaccgcaagcacaaccagcggcccactttccgccaaatgcagcttgagaacgtgtcggtggcgctcgagttcctggaccgcgagagcatcaaactggtgtccatcgacagcaaggccatcgtggacgggaacctgaagctgatcctgggcctcatctggaccctgatcctgcactactccatctccatgcccatgtgggacgaggaggaggatgaggaggccaagaagcagacccccaagcagaggctcctgggctggatccagaacaagctgccgcagctgcccatcaccaacttcagccgggactggcagagcggccgggccctgggcgccctggtggacagctgtgccccgggcctgtgtcctgactgggactcttgggacgccagcaagcccgttaccaatgcgcgagaggccatgcagcaggcggatgactggctgggcatcccccaggtgatcacccccgaggagattgtggaccccaacgtggacgagcactctgtcatgacctacctgtcccagttccccaaggccaagctgaagccaggggctcccttgcggcccaaactgaacccgaagaaagcccgtgcctacgggccaggcatcgagcccacaggcaacatggtgaagaagcgggcagagttcactgtggagaccagaagtgctggccagggagaggtgctggtgtacgtggaggacccggccggacaccaggaggaggcaaaagtgaccgccaataacgacaagaaccgcaccttctccgtctggtacgtccccgaggtgacggggactcataaggttactgtgctctttgctggccagcacatcgccaagagccccttcgaggtgtacgtggataagtcacagggtgacgccagcaaagtgacagcccaaggtcccggcctggagcccagtggcaacatcgccaacaagaccacctactttgagatctttacggcaggagctggcacgggcgaggtcgaggttgtgatccaggaccccatgggacagaagggcacggtagagcctcagctggaggcccggggcgacagcacataccgctgcagctaccagcccaccatggagggcgtccacaccgtgcacgtcacgtttgccggcgtgcccatccctcgcagcccctacactgtcactgttggccaagcctgtaacccgagtgcctgccgggcggttggccggggcctccagcccaagggtgtgcgggtgaaggagacagctgacttcaaggtgtacacaaagggcgctggcagtggggagctgaaggtcaccgtgaagggccccaagggagaggagcgcgtgaagcagaaggacctgggggatggcgtgtatggcttcgagtattaccccatggtccctggaacctatatcgtcaccatcacgtggggtggtcagaacatcgggcgcagtcccttcgaagtgaaggtgggcaccgagtgtggcaatcagaaggtacgggcctggggccctgggctggagggcggcgtcgttggcaagtcagcagactttgtggtggaggctatcggggacgacgtgggcacgctgggcttctcggtggaagggccatcgcaggctaagatcgaatgtgacgacaagggcgacggctcctgtgatgtgcgctactggccgcaggaggctggcgagtatgccgttcacgtgctgtgcaacagcgaagacatccgcctcagccccttcatggctgacatccgtgacgcgccccaggacttccacccagacagggtgaaggcacgtgggcctggattggagaagacaggtgtggccgtcaacaagccagcagagttcacagtggatgccaagcacggtggcaaggccccacttcgggtccaagtccaggacaatgaaggctgccctgtggaggcgttggtcaaggacaacggcaatggcacttacagctgctcctacgtgcccaggaagccggtgaagcacacagccatggtgtcctggggaggcgtcagcatccccaacagccccttcagggtgaatgtgggagctggcagccaccccaacaaggtcaaagtatacggccccggagtagccaagacagggctcaaggcccacgagcccacctacttcactgtggactgcgccgaggctggccagggggacgtcagcatcggcatcaagtgtgcccctggagtggtaggccccgccgaagctgacatcgacttcgacatcatccgcaatgacaatgacaccttcacggtcaagtacacgccccggggggctggcagctacaccattatggtcctctttgctgaccaggccacgcccaccagccccatccgagtcaaggtggagccctctcatgacgccagtaaggtgaaggccgagggccctggcctcagtcgcactggtgtcgagcttggcaagcccacccacttcacagtaaatgccaaagctgctggcaaaggcaagctggacgtccagttctcaggactcaccaagggggatgcagtgcgagatgtggacatcatcgaccaccatgacaacacctacacagtcaagtacacgcctgtccagcagggtccagtaggcgtcaatgtcacttatggaggggatcccatccctaagagccctttctcagtggcagtatctccaagcctggacctcagcaagatcaaggtgtctggcctgggagagaaggtggacgttggcaaagaccaggagttcacagtcaaatcaaagggtgctggtggtcaaggcaaagtggcatccaagattgtgggcccctcgggtgcagcggtgccctgcaaggtggagccaggcctgggggctgacaacagtgtggtgcgcttcctgccccgtgaggaagggccctatgaggtggaggtgacctatgacggcgtgcccgtgcctggcagcccctttcctctggaagctgtggcccccaccaagcctagcaaggtgaaggcgtttgggccggggctgcagggaggcagtgcgggctcccccgcccgcttcaccatcgacaccaagggcgccggcacaggtggcctgggcctgacggtggagggcccctgtgaggcgcagctcgagtgcttggacaatggggatggcacatgttccgtgtcctacgtgcccaccgagcccggggactacaacatcaacatcctcttcgctgacacccacatccctggctccccattcaaggcccacgtggttccctgctttgacgcatccaaagtcaagtgctcaggccccgggctggagcgggccaccgctggggaggtgggccaattccaagtggactgctcgagcgcgggcagcgcggagctgaccattgagatctgctcggaggcggggcttccggccgaggtgtacatccaggaccacggtgatggcacgcacaccattacctacattcccctctgccccggggcctacaccgtcaccatcaagtacggcggccagcccgtgcccaacttccccagcaagctgcaggtggaacctgcggtggacacttccggtgtccagtgctatgggcctggtattgagggccagggtgtcttccgtgaggccaccactgagttcagtgtggacgcccgggctctgacacagaccggagggccgcacgtcaaggcccgtgtggccaacccctcaggcaacctgacggagacctacgttcaggaccgtggcgatggcatgtacaaagtggagtacacgccttacgaggagggactgcactccgtggacgtgacctatgacggcagtcccgtgcccagcagccccttccaggtgcccgtgaccgagggctgcgacccctcccgggtgcgtgtccacgggccaggcatccaaagtggcaccaccaacaagcccaacaagttcactgtggagaccaggggagctggcacgggcggcctgggcctggctgtagagggcccctccgaggccaagatgtcctgcatggataacaaggacggcagctgctcggtcgagtacatcccttatgaggctggcacctacagcctcaacgtcacctatggtggccatcaagtgccaggcagtcctttcaaggtccctgtgcatgatgtgacagatgcgtccaaggtcaagtgctctgggcccggcctgagcccaggcatggttcgtgccaacctccctcagtccttccaggtggacacaagcaaggctggtgtggccccattgcaggtcaaagtgcaagggcccaaaggcctggtggagccagtggacgtggtagacaacgctgatggcacccagaccgtcaattatgtgcccagccgagaagggccctacagcatctcagtactgtatggagatgaagaggtaccccggagccccttcaaggtcaaggtgctgcctactcatgatgccagcaaggtgaaggccagtggccccgggctcaacaccactggcgtgcctgccagcctgcccgtggagttcaccatcgatgcaaaggacgccggggagggcctgctggctgtccagatcacggatcccgaaggcaagccgaagaagacacacatccaagacaaccatgacggcacgtatacagtggcctacgtgccagacgtgacaggtcgctacaccatcctcatcaagtacggtggtgacgagatccccttctccccgtaccgcgtgcgtgccgtgcccaccggggacgccagcaagtgcactgtcacaggtgctggcatcggccccaccattcagattggggaggagacggtgatcactgtggacactaaggcggcaggcaaaggcaaagtgacgtgcaccgtgtgcacgcctgatggctcagaggtggatgtggacgtggtggagaatgaggacggcactttcgacatcttctacacggccccccagccgggcaaatacgtcatctgtgtgcgctttggtggcgagcacgtgcccaacagccccttccaagtgacggctctggctggggaccagccctcggtgcagccccctctacggtctcagcagctggccccacagtacacctacgcccagggcggccagcagacttgggccccggagaggcccctggtgggtgtcaatgggctggatgtgaccagcctgaggccctttgaccttgtcatccccttcaccatcaagaagggcgagatcacaggggaggttcggatgccctcaggcaaggtggcgcagcccaccatcactgacaacaaagacggcaccgtgaccgtgcggtatgcacccagcgaggctggcctgcacgagatggacatccgctatgacaacatgcacatcccaggaagccccttgcagttctatgtggattacgtcaactgtggccatgtcactgcctatgggcctggcctcacccatggagtagtgaacaagcctgccaccttcaccgtcaacaccaaggatgcaggagaggggggcctgtctctggccattgagggcccgtccaaagcagaaatcagctgcactgacaaccaggatgggacatgcagcgtgtcctacctgcctgtgctgccgggggactacagcattctagtcaagtacaatgaacagcacgtcccaggcagccccttcactgctcgggtcacaggtgacgactccatgcgtatgtcccacctaaaggtcggctctgctgccgacatccccatcaacatctcagagacggatctcagcctgctgacggccactgtggtcccgccctcgggccgggaggagccctgtttgctgaagcggctgcgtaatggccacgtggggatttcattcgtgcccaaggagacgggggagcacctggtgcatgtgaagaaaaatggccagcacgtggccagcagccccatcccggtggtgatcagccagtcggaaattggggatgccagtcgtgttcgggtctctggtcagggccttcacgaaggccacacctttgagcctgcagagtttatcattgatacccgcgatgcaggctatggtgggctcagcctgtccattgagggccccagcaaggtggacatcaacacagaggacctggaggacgggacgtgcagggtcacctactgccccacagagccaggcaactacatcatcaacatcaagtttgccgaccagcacgtgcctggcagccccttctctgtgaaggtgacaggcgagggccgggtgaaagagagcatcacccgcaggcgtcgggctccttcagtggccaacgttggtagtcattgtgacctcagcctgaaaatccctgaaattagcatccaggatatgacagcccaggtgaccagcccatcgggcaagacccatgaggccgagatcgtggaaggggagaaccacacctactgcatccgctttgttcccgctgagatgggcacacacacagtcagcgtgaagtacaagggccagcacgtgcctgggagccccttccagttcaccgtggggcccctaggggaagggggagcccacaaggtccgagctgggggccctggcctggagagagctgaagctggagtgccagccgaattcagtatctggacccgggaagctggtgctggaggcctggccattgctgtcgagggccccagcaaggctgagatctcttttgaggaccgcaaggacggctcctgtggtgtggcttatgtggtccaggagccaggtgactacgaagtctcagtcaagttcaacgaggaacacattcccgacagccccttcgtggtgcctgtggcttctccgtctggcgacgcccgccgcctcactgtttctagccttcaggagtcagggctaaaggtcaaccagccagcctcttttgcagtcagcctgaacggggccaagggggcgatcgatgccaaggtgcacagcccctcaggagccctggaggagtgctatgtcacagaaattgaccaagataagtatgctgtgcgcttcatccctcgggagaatggcgtttacctgattgacgtcaagttcaacggcacccacatccctggaagccccttcaagatccgagttggggagcctgggcatggaggggacccaggcttggtgtctgcttacggagcaggtctggaaggcggtgtcacagggaacccagctgagttcgtcgtgaacacgagcaatgcgggagctggtgccctgtcggtgaccattgacggcccctccaaggtgaagatggattgccaggagtgccctgagggctaccgcgtcacctatacccccatggcacctggcagctacctcatctccatcaagtacggcggcccctaccacattgggggcagccccttcaaggccaaagtcacaggcccccgtctcgtcagcaaccacagcctccacgagacatcatcagtgtttgtagactctctgaccaaggccacctgtgccccccagcatggggccccgggtcctgggcctgctgacgccagcaaggtggtggccaagggcctggggctgagcaaggcctacgtaggccagaagagcagcttcacagtagactgcagcaaagcaggcaacaacatgctgctggtgggggttcatggcccaaggaccccctgcgaggagatcctggtgaagcacgtgggcagccggctctacagcgtgtcctacctgctcaaggacaagggggagtacacactggtggtcaaatggggggacgagcacatcccaggcagcccctaccgcgttgtggtgccctgagtctggggcccgtgccagccggcagcccccaagcctgccccgctacccaagcagccccgccctcttcccctcaaccccggcccaggccgccctggccgcccgcctgtcactgcagccgcccctgccctgtgccgtgctgcgctcacctgcctccccagccagccgctgacctctcggctttcacttgggcagagggagccatttggtggcgctgcttgtcttctttggttctgggaggggtgagggatgggggtcctgtacacaaccacccactagttctcttctccagccaagaggaataaagttttgcttccattaaaaaaaaaaaaaaaaaaaaaaaaaaaaaaaaaaaaaaaaaaaaaaa

SEQ ID NO: 63 - DNA, 5091 bp, Homo sapiens
gtcctctctcgcggtatcatccggttgctgaggccctgtaataaaggtctcgcgaaatttgttctagaggtccaagtttgcttcttagcttactccaccccacccccaacctgtccctccttttctttccaagtcacaaaattctcccctcccctaccccggagtttacggccctcctcctgtttccgatttcagcccggaaccggaagtgtagtgggcggggcccgtcggcggaaaacgcagcggagccagagccggacacggctgtggccgctgcctctacccccgccacggatcgccgggtagtaggactgcgcggctccaggctgagggtcggtccggaggcgggtgggcgcgggtctcacccggattgtccgggtggcaccgttcccggccccaccgggcgccgcgagggatcatgtctacagcctctgccgcctcctcctcctcctcgtcttcggccggtgagatgatcgaagccccttcccaggtcctcaactttgaagagatcgactacaaggagatcgaggtggaagaggttgttggaagaggagcctttggagttgtttgcaaagctaagtggagagcaaaagatgttgctattaaacaaatagaaagtgaatctgagaggaaagcgtttattgtagagcttcggcagttatcccgtgtgaaccatcctaatattgtaaagctttatggagcctgcttgaatccagtgtgtcttgtgatggaatatgctgaagggggctctttatataatgtgctgcatggtgctgaaccattgccatattatactgctgcccacgcaatgagttggtgtttacagtgttcccaaggagtggcttatcttcacagcatgcaacccaaagcgctaattcacagggacctgaaaccaccaaacttactgctggttgcaggggggacagttctaaaaatttgtgattttggtacagcctgtgacattcagacacacatgaccaataacaaggggagtgctgcttggatggcacctgaagtttttgaaggtagtaattacagtgaaaaatgtgacgtcttcagctggggtattattctttgggaagtgataacgcgtcggaaaccctttgatgagattggtggcccagctttccgaatcatgtgggctgttcataatggtactcgaccaccactgataaaaaatttacctaagcccattgagagcctgatgactcgttgttggtctaaagatccttcccagcgcccttcaatggaggaaattgtgaaaataatgactcacttgatgcggtactttccaggagcagatgagccattacagtatccttgtcagtattcagatgaaggacagagcaactctgccaccagtacaggctcattcatggacattgcttctacaaatacgagtaacaaaagtgacactaatatggagcaagttcctgccacaaatgatactattaagcgcttagaatcaaaattgttgaaaaatcaggcaaagcaacagagtgaatctggacgtttaagcttgggagcctcccgtgggagcagtgtggagagcttgcccccaacctctgagggcaagaggatgagtgctgacatgtctgaaatagaagctaggatcgccgcaaccacaggcaacggacagccaagacgtagatccatccaagacttgactgtaactggaacagaacctggtcaggtgagcagtaggtcatccagtcccagtgtcagaatgattactacctcaggaccaacctcagaaaagccaactcgaagtcatccatggacccctgatgattccacagataccaatggatcagataactccatcccaatggcttatcttacactggatcaccaactacagcctctagcaccgtgcccaaactccaaagaatctatggcagtgtttgaacagcattgtaaaatggcacaagaatatatgaaagttcaaacagaaattgcattgttattacagagaaagcaagaactagttgcagaactggaccaggatgaaaaggaccagcaaaatacatctcgcctggtacaggaacataaaaagcttttagatgaaaacaaaagcctttctacttactaccagcaatgcaaaaaacaactagaggtcatcagaagtcagcagcagaaacgacaaggcacttcatgattctctgggaccgttacattttgaaatatgcaaagaaagactttttttttaaggaaaggaaaaccttataatgacgattcatgagtgttagctttttggcgtgttctgaatgccaactgcctatatttgctgcatttttttcattgtttattttccttttctcatggtggacatacaattttactgtttcattgcataacatggtagcatctgtgacttgaatgagcagcactttgcaacttcaaaacagatgcagtgaactgtggctgtatatgcatgctcattgtgtgaaggctagcctaacagaacaggaggtatcaaactagctgctatgtgcaaacagcgtccattttttcatattagaggtggaacctcaagaatgactttattcttgtatctcatctcaaaatattaataatttttttcccaaaagatggtatataccaagttaaagacagggtattataaatttagagtgattggtggtatattacggaaatacggaacctttagggatagttccgtgtaagggctttgatgccagcatccttggatcagtactgaactcagttccatccgtaaaatatgtaaaggtaagtggcagctgctctatttaatgaaagcagttttaccggattttgttagactaaaatttgattgtgatacattgaacaaaatggaactcatttttttttaaggagtaaagatttttaattctgtgattgtgtgtatgtgtgttgaaactgtaaagcttttatgactctaatattaatctcttaaatgaaattaaaaggcaaaagaacatgattgagcttaaatgatcatttcttcctgcagtgattcttggattgttttctcatgtatttgaaaaaaaaaaaatgaagaaaaataatggaaaatggaagtaattactccagctaaaaaaagcttggacttagatttctttttatgataccaaatgagaaataaaccaggcaaatcagaaggaagttaaagaagcaaatataaattcaacaagtgtcctaattatcctggatattggaatatttgattttccttacaatcccgttctagaatgcctgccgcctttcaacactttcaagagaatttcaacacttacagagtatttatattgttaacagtaattttgctaccaaaaccttcagaataactttaataataaaatgacactgaaataatagactatacaaactctatattttttcagttggtgttaaaataagtcacattttgataccagtacaagatgtcttttaaataaggatgtcatcagtctgatttttatagcattaatgttttatgaagaaaaagttcaaaatgaaagcattaattgctgtgattattagaattctatcatgactgtattgtagtttttgctctatttcagataagcaagatctaagaagttatcaaaactattctttaaaatgctaaagcaggtaactttttcttccattattttttcctcctaccactgagttttgtaatgaattccttgtgtatacaagcaatacaggtgaatactaaactgttatttttagcttcttcaaaagctattttagaaagcttcctggaaataaatgtcttctgtcatttaatttaaataaaaggagtgttaattgttcccaaatttgattacctagctgaaacagatattggattcagcatagtaatagtaaaataaaattggcagagaaaataactgtagactaggataaagcatgactcctccatagcattgttgcttgtatgtacatctgtcactccactgaaagggacctagtcactttaaagaggccttttatctcagcacgagatatccaagcgtgaatgctaaggcttgatgtttccattaggatttagcattcgagatttcagattttatttatagtcattgatgtgttttgctgtattataacacatttaagggaaattttattatggtttttacatgtagtcatttcataaaaatatccagataggtaaatggaagaaaatagtagattttagtcatggtaccaaatgcaagaggctgttgaacagttgcttgtttgtttacagtaagttccttgagattttcagtactgtagttgccctggacattgagtacagttcagccttactctgtttttaagtagttgtgttgtcaatttcatgcttttaagtcctgatgatccttggagatgggagaaaaagataccagggataattaaaatccacagccagtttcatcagtttcctcatccatcctgcaaataaaaatgttaacaaggagccaaacttattcgttctggttttacaatttattttgaccgttttttgggtgaaaattgcaaacagccaagcaagtggctggaatgccccagtctaagaaattcaaaaacaatcactgagtaagccctaattacattaattacattttactcttgactccaggaaaagaaagcaagcttttatctaatctagagggaagtattcgtgagcaataaaaatcacttttttgagttgaataataatcagttaagaatatttaccgcatagcaacacaacatataaagatttgttacaagttgtttacggatgtttgactatttttgctgaagtattttagagtattgaatgtcttctctcttcaagtttctttcatgttcctaatttcagctcctgtagccagagatcacaggtcttccctgtgaaactttggtttctttctataaatgtgtgtggttttcagcgctcaactcctgtcttcaaatggtagtaagttctacttctacttctgtcattcagaacattttatgtcaaatgatgtaatgcagaaattcttgtgcatatttgtaactgaaggaagctttttagatttatttttgtttttaataaaattcagattcctattctaaactggtaaaaaa

SEQ ID NO: 64 - DNA, 503 bp, Homo sapiens
gtacctgtctataaggagtcctgcttatcacaatgaatgttctcctgggcagcgttgtgatctttgccaccttcgtgactttatgcaatgcatcatgctatttcatacctaatgagggagttccaggagattcaaccaggaaatgcatggatctcaaaggaaacaaacacccaataaactcggagtggcagactgacaactgtgagacatgcacttgctacgaaacagaaatttcatgttgcacccttgtttctacacctgtgggttatgacaaagacaactgccaaagaatcttcaagaaggaggactgcaagtatatcgtggtggagaagaaggacccaaaaaagacctgttctgtcagtgaatggataatctaatgtgcttctagtaggcacagggctcccaggccaggcctcattctcctctggcctctaatagtcaatgattgtgtagccatgcctatcagtaaaaagatttttgagcaaacacttgaaaaaaaaaaa

SEQ ID NO: 65 - DNA, 7852 bp, Homo sapiens
ggcgctgagcgagctcggagcccgcgctgtgcgcctgcggccggggcgccccgccgagcgccggtgccccggctcccgggccgccttcgccgcgcgggaaggattcttcaaaattaacagaaaccaattcgggccagctgaagagaaaaaataaaggtggctcccggctgcctctgctgcagttcagagcaacttcaggagcttcccagccgagagcttcaggacgcctttcctgtcccactggcccagttgccacaacaaacaacagagaagacggtgaccatgggggatgtgaagctggttgcctcgtcacacatttccaaaacctccctcagtgtggatccctcaagagttgactccatgcccctgacagaggcccctgctttcattttgccccctcggaacctctgcatcaaagaaggagccaccgccaagttcgaagggcgggtccggggttacccagagccccaggtgacatggcacagaaacgggcaacccatcaccagcgggggccgcttcctgctggattgcggcatccgggggactttcagccttgtgattcatgctgtccatgaggaggacaggggaaagtatacctgtgaagccaccaatggcagtggtgctcgccaggtgacagtggagttgacagtagaaggaagttttgcgaagcagcttggtcagcctgttgtttccaaaaccttaggggatagattttcagctccagcagtggagacccgtcctagcatctggggggagtgcccaccaaagtttgctaccaagctgggccgagttgtggtcaaagaaggacagatgggacgattctcctgcaagatcactggccggccccaaccgcaggtcacctggctcaagggaaatgttccactgcagccgagtgcccgtgtgtctgtgtctgagaagaacggcatgcaggttctggaaatccatggagtcaaccaagatgacgtgggagtgtacacgtgcctggtggtgaacgggtcggggaaggcctcgatgtcagctgaactttccatccaaggtttggacagtgccaataggtcatttgtgagagaaacaaaagccaccaattcagatgtcaggaaagaggtgaccaatgtaatctcaaaggagtcgaagctggacagtctggaggctgcagccaaaagcaagaactgctccagcccccagagaggtggctccccaccctgggctgcaaacagccagcctcagcccccaagggagtccaagctggagtcatgcaaggactcgcccagaacggccccgcagaccccggtccttcagaagacttccagctccatcaccctgcaggccgcaagagttcagccggaaccaagagcaccaggcctgggggtcctatcaccttctggagaagagaggaagaggccagctcctccccgtccagccaccttccccaccaggcagcctggcctggggagccaagatgttgtgagcaaggctgctaacaggagaatccccatggagggccagagggattcagcattccccaaatttgagagcaagccccaaagccaggaggtcaaggaaaatcaaactgtcaagttcagatgtgaagtttccgggattccaaagcctgaagtggcctggttcctggaaggcacccccgtgaggagacaggaaggcagcattgaggtttatgaagatgctggctcccattacctctgcctgctgaaagcccggaccagggacagtgggacatacagctgcactgcttccaacgcccaaggccagctgtcctgtagctggaccctccaagtggaaaggcttgccgtgatggaggtggccccctccttctccagtgtcctgaaggactgcgctgttattgagggccaggattttgtgctgcagtgctccgtacgggggaccccagtgccccggatcacttggctgctgaatgggcagcccatccagtacgctcgctccacctgcgaggccggcgtggctgagctccacatccaggatgccctgccggaggaccatggcacctacacctgcctagctgagaatgccttggggcaggtgtcctgcagcgcctgggtcaccgtccatgaaaagaagagtagcaggaagagtgagtaccttctgcctgtggctcccagcaagcccactgcacccatcttcctgcagggcctctctgatctcaaagtcatggatggaagccaggtcactatgactgtccaagtgtcagggaatccaccccctgaagtcatctggctgcacaatgggaatgagatccaagagtcagaggacttccactttgaacagagaggaactcagcacagcctttgtatccaggaagtgttcccggaggacacgggcacgtacacctgcgaggcctggaacagcgctggagaggtccgcacccaggccgtgctcacggtacaagagcctcacgatggcacccagccctggttcatcagtaagcctcgctcagtgacagcctccctgggccagagtgtcctcatctcctgcgccatagctggtgacccctttcctaccgtgcactggctcagagatggcaaagccctctgcaaagacactggccacttcgaggtgcttcagaatgaggacgtgttcaccctggttctaaagaaggtgcagccctggcatgccggccagtatgagatcctgctcaagaaccgggttggcgaatgcagttgccaggtgtcactgatgctacagaacagctctgccagagcccttccacgggggagggagcctgccagctgcgaggacctctgtggtggaggagttggtgctgatggtggtggtagtgaccgctatgggtccctgaggcctggctggccagcaagagggcagggttggctagaggaggaagacggcgaggacgtgcgaggggtgctgaagaggcgcgtggagacgaggcagcacactgaggaggcgatccgccagcaggaggtggagcagctggacttccgagacctcctggggaagaaggtgagtacaaagaccctatcggaagacgacctgaaggagatcccagccgagcagatggatttccgtgccaacctgcagcggcaagtgaagccaaagactgtgtctgaggaagagaggaaggtgcacagcccccagcaggtcgattttcgctctgtcctggccaagaaggggacttccaagacccccgtgcctgagaaggtgccaccgccaaaacctgccaccccggattttcgctcagtgctgggtggcaagaagaaattaccagcagagaatggcagcagcagtgccgagaccctgaatgccaaggcagtggagagttccaagcccctgagcaatgcacagccttcagggcccttgaaacccgtgggcaacgccaagcctgctgagaccctgaagccaatgggcaacgccaagcctgccgagaccctgaagcccatgggcaatgccaagcctgatgagaacctgaaatccgctagcaaagaagaactcaagaaagacgttaagaatgatgtgaactgcaagagaggccatgcagggaccacagataatgaaaagagatcagagagccaggggacagccccagccttcaagcagaagctgcaagatgttcatgtggcagagggcaagaagctgctgctccagtgccaggtgtcttctgaccccccagccaccatcatctggacgctgaacggaaagaccctcaagaccaccaagttcatcatcctctcccaggaaggctcactctgctccgtctccatcgagaaggcactgcctgaggacagaggcttatacaagtgtgtagccaagaatgacgctggccaggcggagtgctcctgccaagtcaccgtggatgatgctccagccagtgagaacaccaaggccccagagatgaaatcccggaggcccaagagctctcttcctcccgtgctaggaactgagagtgatgcgactgtgaaaaagaaacctgcccccaagacacctccgaaggcagcaatgccccctcagatcatccagttccctgaggaccagaaggtacgcgcaggagagtcagtggagctgtttggcaaagtgacaggcactcagcccatcacctgtacctggatgaagttccgaaagcagatccaggaaagcgagcacatgaaggtggagaacagcgagaatggcagcaagctcaccatcctggccgcgcgccaggagcactgcggctgctacacactgctggtggagaacaagctgggcagcaggcaggcccaggtcaacctcactgtcgtggataagccagaccccccagctggcacaccttgtgcctctgacattcggagctcctcactgaccctgtcctggtatggctcctcatatgatgggggcagtgctgtacagtcctacagcatcgagatctgggactcagccaacaagacgtggaaggaactagccacatgccgcagcacctctttcaacgtccaggacctgctgcctgaccacgaatataagttccgtgtacgtgcaatcaacgtgtatggaaccagtgagccaagccaggagtctgaactcacaacggtaggagagaaacctgaagagccgaaggatgaagtggaggtgtcagatgatgatgagaaggagcccgaggttgattaccggacagtgacaatcaatactgaacaaaaagtatctgacttctacgacattgaggagagattaggatctgggaaatttggacaggtctttcgacttgtagaaaagaaaactcgaaaagtctgggcagggaagttcttcaaggcatattcagcaaaagagaaagagaatatccggcaggagattagcatcatgaactgcctccaccaccctaagctggtccagtgtgtggatgcctttgaagaaaaggccaacatcgtcatggtcctggagatcgtgtcaggaggggagctgtttgagcgcatcattgacgaggactttgagctgacggagcgtgagtgcatcaagtacatgcggcagatctcggagggagtggagtacatccacaagcagggcatcgtgcacctggacctcaagccggagaacatcatgtgtgtcaacaagacgggcaccaggatcaagctcatcgactttggtctggccaggaggctggagaatgcggggtctctgaaggtcctctttggcaccccagaatttgtggctcctgaagtgatcaactatgagcccatcggctacgccacagacatgtggagcatcggggtcatctgctacatcctagtcagtggcctttcccccttcatgggagacaacgataacgaaaccttggccaacgttacctcagccacctgggacttcgacgacgaggcattcgatgagatctccgacgatgccaaggatttcatcagcaatctgctgaagaaagatatgaaaaaccgcctggactgcacgcagtgccttcagcatccatggctaatgaaagataccaagaacatggaggccaagaaactctccaaggaccggatgaagaagtacatggcaagaaggaaatggcagaaaacgggcaatgctgtgagagccattggaagactgtcctctatggcaatgatctcagggctcagtggcaggaaatcctcaacagggtcaccaaccagcccgctcaatgcagaaaaactagaatctgaagaagatgtgtcccaagctttccttgaggctgttgctgaggaaaagcctcatgtaaaaccctatttctctaagaccattcgcgatttagaagttgtggagggaagtgctgctagatttgactgcaagattgaaggatacccagaccccgaggttgtctggttcaaagatgaccagtcaatcagggagtcccgccacttccagatagactacgatgaggacgggaactgctctttaattattagtgatgtttgcggggatgacgatgccaagtacacctgcaaggctgtcaacagtcttggagaagccacctgcacagcagagctcattgtggaaacgatggaggaaggtgaaggggaaggggaagaggaagaagagtgaaacaaagccagagaaaagcagtttctaagtcatattaaaaggactatttctctaaaactcaaaaaaaaaaaaaaaactcaagatagtaaaagcacctagtgtgatagattatcggttaggtcatttgtgggttgattcttcagaaacagcagttgatacctagcagcgttattgatgggcattaatctatgttagttggcaccttaagatactagtgcagctagatttcatttagggaaatcaccagtaacttgactgaccaattgattttagagagaaagtaaccaaaccaaatatttatctgggcaaagtcataaattctccacttgaatgcgctcatgaaaaataaggccaaaacaagagttctgggccacagctcagcccagagggttcctggggatgggaggcctctctctccccaccccctgactctagagaactgggttttctcccagtactccagcaattcatttctgaaagcagttgagccactttattccaaagtacactgcagatgttcaaactctccatttctctttccccttccacctgccagttttgctgactctcaacttgtcatgagtgtaagcattaaggacattatgcttcttcgattctgaagacaggtccctgctcatggatgactctggcttccttaggaaaatatttttcttccaaaatcagtaggaaatctaaacttatcccctctttgcagatgtctagcagcttcagacatttggttaagaacccatgggaaaaaaaaaatccttgctaatgtggtttcctttgtaaaccaggattcttatttgtgctgttatagaatatcagctctgaacgtgtggtaaagatttttgtgtttgaatataggagaaatcagtttgctgaaaagttagtcttaattatctattggccacgatgaaacagatttcaactgataaagagctggagaactccatgtactttggaatctcctccaagatagccagagtttaatacatcttcattctcaacactctccaaagaacttgacctaccttatgggttccatatttttcttcttaaatgtgcatcaatcatgccttgcccccaacctttaaatatattcttagacctggtaaatgcactcagacttgcgtctttaggaatttttaactttctttcactacattggcacttaaattttttctttataaagctttttgaaggtcataaacaaagaccataattgatgatagacctaatacatttcctctgtgtgtgtgtgtaacattccaaatactttttttttcttttccactgtttgtaaggtgcaacaatttaatatttttaagggactttttaagagttccttaagaaccaatttaaaattacttcagtgcaatcctacacagtatcaacattagaattttgatattagtcttatgttatcttccattctatttttatctgctttttgctgctagtttcaaactgccagtatttttccttttgcttttaaaatagttacaatatttttcatgatagccacagtattgccacagtttattataataaagggtttttatttgatttagcgcattcaaagcttttttctatcacttttgtgttcagaatataacctttgtgtgcgtgtatgttgtgtgtgtgcatgtgtggcgtatatgtgtgttacaggttaatgccttcttggaattgtgttaatgttctcttggtttattatgccatcagaatggtaaatgagaacactacaactgtagtcagctcacaatttttaaataaaggataccacagtgcatgctgtttgttcaaaaaaaaaaaaaaaaaa

SEQ ID NO: 66 - DNA, 1545 bp, Homo sapiens
tttccgcgagcgccggcactgcccgctccgagcccgtgtctgtcgggtgccgagccaactttcctgcgtccatgcagccccgccggcaacggctgcctgctccctggtccgggcccaggggcccgcgccccaccgccccgctgctcgcgctgctgctgttgctcgccccggtggcggcgcccgcggggtccggggaccccgacgaccctgggcagcctcaggatgctggggtcccgcgcaggctcctgcagcaggcggcgcgcgcggcgcttcacttcttcaacttccggtccggctcgcccagcgcgctacgagtgctggccgaggtgcaggagggccgcgcgtggattaatccaaaagagggatgtaaagttcacgtggtcttcagcacagagcgctacaacccagagtctttacttcaggaaggtgagggacgtttggggaaatgttctgctcgagtgtttttcaagaatcagaaacccagaccaaccatcaatgtaacttgtacacggctcatcgagaaaaagaaaagacaacaagaggattacctgctttacaagcaaatgaagcaactgaaaaaccccttggaaatagtcagcatacctgataatcatggacatattgatccctctctgagactcatctgggatttggctttccttggaagctcttacgtgatgtgggaaatgacaacacaggtgtcacactactacttggcacagctcactagtgtgaggcagtggaaaactaatgatgatacaattgattttgattatactgttctacttcatgaattatcaacacaggaaataattccctgtcgcattcacttggtctggtaccctggcaaacctcttaaagtgaagtaccactgtcaagagctacagacaccagaagaagcctccggaactgaagaaggatcagctgtagtaccaacagagcttagtaatttctaaaaagaaaaaatgatctttttccgacttctaaacaagtgactatactagcataaatcattcttctagtaaaacagctaaggtatagacattctaataatttgggaaaacctatgattacaagtaaaaactcagaaatgcaaagatgttggttttttgtttctcagtctgctttagcttttaactctggaagcgcatgcacactgaactctgctcagtgctaaacagtcaccagcaggttcctcagggtttcagccctaaaatgtaaaacctggataatcagtgtatgttgcaccagaatcagcattttttttttaactgcaaaaaatgatggtctcatctctgaatttatatttctcattcttttgaacatactatagctaatatattttatgttgctaaattgcttctatctagcatgttaaacaaagataatatactttcgatgaaagtaaattataggaaaaaaattaactgttttaaaaagaacttgattatgttttatgatttcaggcaagtattcatttttaacttgctacctacttttaaataaatgtttacatttctaaataaaaaaaaaaaaaaaaaaaaa

SEQ ID NO: 67 - DNA, 739 bp, Homo sapiens
cgtggcgcagcgactcggaggttcgcctccagcttgcgcatcatctgcggccgggtcccgatgagcctcctgttgcctccgctggcgctgctgctgcttctcgcggcgcttgtggccccagccacagccgccactgcctaccggccggactggaaccgtctgagcggcctaacccgcgcccgggtagagacctgcgggggatgacagctgaaccgcctaaaggaggtgaaggctttcgtcacgcaggacattccattctatcacaacctggtgatgaaacacctccctggggccgaccctgagctcgtgctgctgggccgccgctacgaggaactagagcgcatcccactcagtgaaatgacccgcgaagagatcaatgcgctagtgcaggagctcggcttctaccgcaaggcggcgcccgacgcgcaggtgccccccgagtacgtgtgggcgcccgcgaagcccccagaggaaacttcggaccacgctgacctgtaggtccgggggcgcggcggagctgggacctacctgcctgagtcctggagacagaatgaagcgctcagcatcccgggaatacttctcttgctgagagccgatgcccgtccccgggccagcagggatggggttggggaggttctcccaaccccactttcttccttccccagctccactaaattccctcctgccttaaaaaaaaaaaaaaaaaaaaaaaaaaaaaaaaaaaaaaaaaaaaaaaaaa

SEQ ID NO: 68 - DNA, 4482 bp, Homo sapiens
gcactccagccctgcagcctccggagtcagtgccgcgcgcccgccgccccgcgccttcctgctcgccgcacctccgggagccggggcgcacccagcccgcagcgccgcctccccgcccgcgccgcctccgaccgcaggccgagggccgccactggccggggggaccgggcagcagcttgcggccgcggagccgggcaacgctggggactgcgccttttgtccccggaggtccctggaagtttgcggcaggacgcgcgcggggaggcggcggaggcagccccgacgtcgcggagaacagggcgcagagccggcatgggcatcgggcgcagcgaggggggccgccgcggggcagccctgggcgtgctgctggcgctgggcgcggcgcttctggccgtgggctcggccagcgagtacgactacgtgagcttccagtcggacatcggcccgtaccagagcgggcgcttctacaccaagccacctcagtgcgtggacatccccgcggacctgcggctgtgccacaacgtgggctacaagaagatggtgctgcccaacctgctggagcacgagaccatggcggaggtgaagcagcaggccagcagctgggtgcccctgctcaacaagaactgccacgccggcacccaggtcttcctctgctcgctcttcgcgcccgtctgcctggaccggcccatctacccgtgtcgctggctctgcgaggccgtgcgcgactcgtgcgagccggtcatgcagttcttcggcttctactggcccgagatgcttaagtgtgacaagttccccgagggggacgtctgcatcgccatgacgccgcccaatgccaccgaagcctccaagccccaaggcacaacggtgtgtcctccctgtgacaacgagttgaaatctgaggccatcattgaacatctctgtgccagcgagtttgcactgaggatgaaaataaaagaagtgaaaaaagaaaatggcgacaagaagattgtccccaagaagaagaagcccctgaagttggggcccatcaagaagaaggacctgaagaagcttgtgctgtacctgaagaatggggctgactgtccctgccaccagctggacaacctcagccaccacttcctcatcatgggccgcaaggtgaagagccagtacttgctgacggccatccacaagtgggacaagaaaaacaaggagttcaaaaacttcatgaagaaaatgaaaaaccatgagtgccccacctttcagtccgtgtttaagtgattctcccgggggcagggtggggagggagcctcgggtggggtgggagcgggggggacagtgccccgggaacccggtgggtcacacacacgcactgcgcctgtcagtagtggacattgtaatccagtcggcttgttcttgcagcattcccgctcccttccctccatagccacgctccaaaccccagggtagccatggccgggtaaagcaagggccatttagattaggaaggtttttaagatccgcaatgtggagcagcagccactgcacaggaggaggtgacaaaccatttccaacagcaacacagccactaaaacacaaaaagggggattgggcggaaagtgagagccagcagcaaaaactacattttgcaacttgttggtgtggatctattggctgatctatgcctttcaactagaaaattctaatgattggcaagtcacgttgttttcaggtccagagtagtttctttctgtctgctttaaatggaaacagactcataccacacttacaattaaggtcaagcccagaaagtgataagtgcagggaggaaaagtgcaagtccattatgtaatagtgacagcaaagggaccaggggagaggcattgccttctctgcccacagtctttccgtgtgattgtctttgaatctgaatcagccagtctcagatgccccaaagtttcggttcctatgagcccggggcatgatctgatccccaagacatgtggaggggcagcctgtgcctgcctttgtgtcagaaaaaggaaaccacagtgagcctgagagagacggcgattttcgggctgagaaggcagtagttttcaaaacacatagttaaaaaagaaacaaatgaaaaaaattttagaacagtccagcaaattgctagtcagggtgaattgtgaaattgggtgaagagcttaggattctaatctcatgttttttccttttcacatttttaaaagaacaatgacaaacacccacttatttttcaaggttttaaaacagtctacattgagcatttgaaaggtgtgctagaacaaggtctcctgatccgtccgaggctgcttcccagaggagcagctctccccaggcatttgccaagggaggcggatttccctggtagtgtagctgtgtggctttccttcctgaagagtccgtggttgccctagaacctaacaccccctagcaaaactcacagagctttccgtttttttctttcctgtaaagaaacatttcctttgaacttgattgcctatggatcaaagaaattcagaacagcctgcctgtccccccgcactttttacatatatttgtttcatttctgcagatggaaagttgacatgggtggggtgtccccatccagcgagagagtttcaaaagcaaaacatctctgcagtttttcccaagtaccctgagatacttcccaaagcccttatgtttaatcagcgatgtatataagccagttcacttagacaactttacccttcttgtccaatgtacaggaagtagttctaaaaaaaatgcatattaatttcttcccccaaagccggattcttaattctctgcaacactttgaggacatttatgattgtccctctgggccaatgcttatacccagtgaggatgctgcagtgaggctgtaaagtggccccctgcggccctagcctgacccggaggaaaggatggtagattctgttaactcttgaagactccagtatgaaaatcagcatgcccgcctagttacctaccggagagttatcctgataaattaacctctcacagttagtgatcctgtccttttaacaccttttttgtggggttctctctgacctttcatcgtaaagtgctggggaccttaagtgatttgcctgtaattttggatgattaaaaaatgtgtatatatattagctaattagaaatattctacttctctgttgtcaaactgaaattcagagcaagttcctgagtgcgtggatctgggtcttagttctggttgattcactcaagagttcagtgctcatacgtatctgctcattttgacaaagtgcctcatgcaaccgggccctctctctgcggcagagtccttagtggaggggtttacctggaacattagtagttaccacagaatacggaagagcaggtgactgtgctgtgcagctctctaaatgggaattctcaggtaggaagcaacagcttcagaaagagctcaaaataaattggaaatgtgaatcgcagctgtgggttttaccaccgtctgtctcagagtcccaggaccttgagtgtcattagttactttattgaaggttttagacccatagcagctttgtctctgtcacatcagcaatttcagaaccaaaagggaggctctctgtaggcacagagctgcactatcacgagcctttgtttttctccacaaagtatctaacaaaaccaatgtgcagactgattggcctggtcattggtctccgagagaggaggtttgcctgtgatttcctaattatcgctagggccaaggtgggatttgtaaagctttacaataatcattctggatagagtcctgggaggtccttggcagaactcagttaaatctttgaagaatatttgtagttatcttagaagatagcatgggaggtgaggattccaaaaacattttatttttaaaatatcctgtgtaacacttggctcttggtacctgtgggttagcatcaagttctccccagggtagaattcaatcagagctccagtttgcatttggatgtgtaaattacagtaatcccatttcccaaacctaaaatctgtttttctcatcagactctgagtaactggttgctgtgtcataacttcatagatgcaggaggctcaggtgatctgtttgaggagagcaccctaggcagcctgcagggaataacatactggccgttctgacctgttgccagcagatacacaggacatggatgaaattcccgtttcctctagtttcttcctgtagtactcctcttttagatcctaagtctcttacaaaagctttgaatactgtgaaaatgttttacattccatttcatttgtgttgtttttttaactgcattttaccagatgttttgatgttatcgcttatgttaatagtaattcccgtacgtgttcattttattttcatgctttttcagccatgtatcaatattcacttgactaaaatcactcaattaatcaatgataaaaaaaaaaaaaaaa

SEQ ID NO: 69 - DNA, 7355 bp, Homo sapiens
agtctgcgggcctccggggcagcggcgaggccggagcgtcgcggcggagaggacgagaccgggacaagaccagggcaggagggagccggccagccgcgagaaccccgcacgcccggcaagatgctgtcctggcggctgcagacgggccccgagaaggccgagctccaggagctcaacgcccggctctatgactacgtgtgtcgggtgcgggagctggagcgcgaaaacctactcctggaggaggagctgcgcggccggcgcgggcgagagggcctgtgggccgaggggcaggcccgctgcgccgaggaggcgcgcagcttgcggcagcagctggacgagctgagctgggccactgcgctggcggagggcgagcgggacgctctgcggcgcgagctgcgggagctgcagcgcctggatgcggaggagcgcgccgcccgcggccgcctggacgccgagctgggtgcgcagcagcgcgagctgcaggaggcgctgggcgcgcgcgccgccctcgaggcgctgctgggccggctgcaggccgagcgccgaggcctcgacgcggcccacgaacgcgacgtgagggagctgcgcgcgcgcgccgccagccttaccatgcatttccgcgcccgcgccaccggccccgccgcgccgccgccacgcctgcgggaggtgcacgacagctacgcactgctggtggccgagtcgtggcgggagacggtgcagctgtacgaggacgaggtgcgcgagctggaggaggcgctgcggcgcggccaggagagcagactccaggcggaggaagagacgcggctgtgcgcgcaggaggcagaggcgctgcggcgcgaggcgctcgggttggagcagctgcgcgcgcggctggaggacgcgctgctgcggatgcgcgaggagtacgggatacaggccgaggagcggcagagagtgattgactgcctggaggatgagaaggcaaccctcaccttggccatggctgactggctgcgggactatcaggacctcctgcaggtgaagaccggcctcagtctggaggtggcgacctaccgggccttattggaaggagaaagtaatccagagatagtgatctgggctgagcacgttgaaaacatgccgtcagaattcagaaacaaatcctatcactataccgactcactactacagagggaaaatgaaaggaatctattttcaaggcagaaagcacctttggcaagtttcaatcacagctcggcactgtattctaacctgtcagggcaccgtggatctcagacgggcacatctattggaggtgatgccagaagaggcttcttgggctcgggatattcttcctcggccactacccagcaggaaaactcatacggaaaagccgtcagcagtcaaaccaacgtcagaactttctctccaacctatggccttttaagaaatactgaggctcaagtgaaaacattccctgacagaccaaaagccggagatacaagggaggtccccgtttacataggtgaagattccacaattgcccgcgagtcgtaccgggatcgccgagacaaggtggcagcaggtgcttcggaaagcacacggtcaaatgagaggaccgtcattctgggaaagaaaacagaagtgaaagccacgagggagcaagaaagaaacagaccagaaaccatccgaacaaagccagaagagaaaatgttcgattctaaagagaaggcttccgaggagagaaacctaagatgggaagaattgacaaagttagataaggaagcgagacagagagaaagccagcagatgaaggagaaggctaaggagaaggactcaccgaaggagaagagcgtgcgagagagagaggtgccgattagtctagaagtatcccaggacagaagagcagaggtgtccccgaaaggtttgcagacgcctgtgaaggatgctggtggtgggaccggtagagaggcagaagcaagagagctacggttcaggttgggcaccagtgatgccactggttctctgcaaggcgattccatgacagaaaccgtagcagaaaacatcgttaccagtatcctgaagcagttcactcagtctccagagacagaagcatctgctgattcttttccagacacaaaagtcacttacgtggacaggaaagagcttcctggggaaaggaaaacaaagactgaaatagttgtggagtctaaactgactgaggatgttgatgtttccgatgaagctggcctggactaccttttaagcaaggatattaaggaagtggggctgaaaggcaagtcagccgagcagatgataggagacatcatcaacctcggcctgaaagggagggaggggagagcaaaggtcgtcaacgtggagatcgtggaggagcccgtgagttatgtcagcggggagaagccggaggagttttccgtcccattcaaagtggaggaggtcgaagatgtgtcgccaggcccctgggggttggttaaggaggaggaaggttatggagaaagcgatgtcacattctcagttaatcagcatcgaaggaccaagcagcctcaggagaacacgactcacgtggaagaagtgacagaggcaggtgattcagagggcgagcagagttattttgtgtccactccagatgaacaccccggggggcacgacagagatgacggctcggtgtacgggcagatccacatcgaggaggaatccaccatcaggtactcttggcaggatgaaatcgtgcaggggactcgaaggaggacacagaaggacggtgcagtgggcgagaaggttgtgaagcccttggatgtcccagcgccctctctggagggggacctgggttccactcactggaaagaacaagctagaagcggtgaatttcatgccgaacccacagtcattgaaaaagaaattaaaataccccacgaattccacacctccatgaagggcatctcctccaaggagccccggcagcagctggtggaggtcatcgggcagctggaggaaacccttcccgagcgcatgagggaggagctgtccgccctcaccagagaggggcagggtgggccggggagcgtttccgtggatgtcaagaaggtccagggtgctggtggcagttccgtgaccctggttgctgaagtcaacgtctcacaaactgtggatgccgatcggttagacctggaggagctgagcaaagatgaggccagtgagatggagaaggctgtggagtcggtggttcgggagagcctgagcaggcaacgcagcccagcgcctggcagcccagatgaggaaggtggagcggaggccccggctgctggcattcgctttaggcgttgggccacccgggagctgtacatcccttcaggcgagagcgaggttgctggtggggcctctcacagctcgggacagcgcactccccagggcccagtgtcggccactgtggaggtcagcagccccacaggctttgcccagtcacaggtgctggaggatgtgagccaggctgcaaggcacataaaactcggcccctctgaagtctggaggactgagcgaatgtcatatgaaggacccactgcagaagtggtggaggtaagtgcgggaggtgacctaagtcaggcagcgagcccgaccggagccagccggtctgtgaggcatgtcacgctgggtcccggtcaaagtccactgtccagagaagtcatcttcctaggccctgcccctgcctgtccagaggcatggggctcgccagaacctggcccagcagagtcttctgcagatatggacggatcagggaggcacagcacatttggctgcagacaatttcatgctgaaaaggagattatttttcagggccccatttctgctgcagggaaggttggtgattattttgcaacagaagagtcagtgggtacccagacttctgtcaggcaactccagttaggccctaaagaagggttcagtgggcaaatccagttcacagctccactttcagacaaggtggagttgggtgtcataggagattctgtacacatggaagggttgccagggagcagcacatccatcaggcacatcagcattgggcctcagaggcatcagaccacccagcagatagtttaccatgggctggttccccaactgggggaatctggtgactcagagagcactgtgcacggagagggctcagcagatgtgcaccaggccactcacagtcatacctcgggtagacaaaccgttatgactgaaaagagcaccttccaaagtgtcgtttctgaatctccccaggaggatagtgcagaggacacatcaggggcagaaatgacatcgggtgttagcagatcctttaggcacattcgactaggtcctacagaaacggaaacctctgaacacattgccatccgtggacccgtgtccagaacatttgtgcttgctggttcagcggactcccctgagctaggcaagttagcagacagcagcagaacgctaaggcacattgcaccagggcccaaagaaacttcgtttacctttcagatggatgtgagtaacgtagaggcgatccgcagccggacacaggaagcgggagctctcggtgtgtctgaccgtggttcctggagagacgcggacagtaggaatgaccaggcagttggtgtgagctttaaggcctctgctggggaaggagaccaggcccacagagaacagggcaaggagcaggccatgtttgataagaaggtgcagctccagagaatggtagaccaaaggtcggtgatttcagatgaaaagaaagttgccctcctctatctagacaatgaggaggaggagaatgatgggcattggttttaataagcagaaacattttgttttaatggcagcctgttggcgacgtgccaacatccaaaggccttaacttattttaagaggccgagggagtctatgaaaatctccccttttttacttttttaaagagtactcccggcatggtcaatttcctttatagttaatccgtaaaggtttccagttaattcatgccttaaaaggcactgcaattttatttttgagttgggacttttacaaaacacttttttccctggagtcttctctccacttctggagatgaatttctatgttttgcacctggtcacagacatggcttgcatctgtttgaaactacaattaattatagatgtcaaaacattaaccagattaaagtaatatatttaagagtaaattttgcttgcatgtgctaatatgaaataacagactaacattttaggggaaaaataaatacaatttagactctaaaaagtcttttcaaaaagaaatgggaaataggcagactgtttatgttaaaaaaattcttgctaaatgatttcatctttaggaaaaaattacttgccatatagagctaaattcatcttaagacttgaatgaattgctttctatgtacagaactttaaacaatatagtatttatggcgaggacagctgtagtctgttgtgatatttcacattctatttgcacaggttccctggcactggtagggtagatgattattgggaatcgcttacagtaccatttcattttttggcactaggtcattaagtagcacacagtctgaatgcccttttctggagtggccagttcctatcagactgtgcagacttgcgcttctctgcaccttatcccttagcacccaaacatttaatttcactggtgggaggtagaccttgaagacaatgaagagaatgccgatactcagactgcagctggaccggcaagctggctgtgtacaggaaaattggaagcacacagtggactgtgcctcttaaagatgcctttcccaaccctccattcatgggatgcaggtctttctgagctcaagggtgaaagatgaatacaataacaaccatgaacccacctcacggaagctttttttgcactttgaacagaagtcattgcagttggggtgttttgtccagggaaacagtttattaaatagaaggatgttttggggaaggaactggatatctctcctgcagcccagcaccgagatacccaggacgggcctggggggcgagaaaggcccccatgctcatgggccgcggagtgtggacctgtagataggcaccaccgagtttaagatactgggatgagcatgcttcattggattcattttattttacacgtcagtattgttttaaagtttctgtctgtaaagtgtagcatcatatataaaaagagtttcgctagcagcgcattttttttagttcaggctagcttctttcacataatgctgtctcagctgtatttccagtaacacagcatcatcgcactgactgtggcgcactggggaataacagtctgagctagcaccaccctcagccaggctacaacgacagcactggagggtcttccctctcagattcacctggaggccctcagacccccagggtgcacgtctccccaggtcctgggagtggctaccgcaggtagtttctggagagcacgttttcttcattgataagtggaggagaaatgcagcacagctttcaagatactattttaaaaacaccatgaatcagatagggaaagaaagttgattggaatagcaagtttaaacctttgttgtccatctgccaaatgaactagtgattgtcagactggtatggaggtgactgctttgtaaggttttgtcgtttctaatacagacagagatgtgctgattttgttttagctgtaacaggtaatggtttttggatagatgattgactggtgagaatttggtcaaggtgacagcctcctgtctgatgacaggacagactggtggtgaggagtctaagtgggctcagtttgatgtcagtgtctgggctcatgacttgtaaatggaagctgatgtgaacaggtaattaatattatgacccacttctatttactttgggaaatatcttggatcttaattatcatctgcaagtttcaagaagtattctgccaaaagtatttacaagtatggactcatgagctattgttggttgctaaatgtgaatcacgcgggagtgagtgtgcccttcacactgtgacattgtgacattgtgacaagctccatgtcctttaaaatcagtcactctgcacacaagagaaatcaacttcgtggttggatggggccggaacacaaccagtctttttgtatttattgttactgagacaaaacagtactcactgagtgtttttcagtttcctactggtggttttgatattgtttgtttaagatgtatatttagaatgacatcatctaagaagctgattttgctaaactcctgttccctacaatgggaaatgtcacaagaatgtgcaaaaataaaaatctgaggaaaaaacccaca

SEQ ID NO: 70 - DNA, 9950 bp, Homo sapiens
gagcccattagccgcacaaattcgcagcaggcggctggggcggcggctggggcagcggctgcagcagcggcggacgctctgcattacccagtcttgcgtcctcggcaggcgcccgaagctgagtgcgcatcctctaccgcacccaagcttcgtctgtctcgtcaagctcttcatgctgcccaactaaaaggaaaacatgggcacaggggattttatctgcatttccatgactggaggggcgccctgggggttcagattgcaaggtggcaaggagcagaagcagcccttacaagttgcaaagattcgaaatcagagcaaagcctctgggtctgggctctgtgagggagatgaagtggtttccatcaatggcaacccttgtgcagatctcacctaccctgaagtcatcaagctcatggaaagcataacagactctctccaaatgctcatcaaaagaccatccagtggaataagtgaggctttgatatctgaaaatgaaaacaaaaacctcgagcatctcacacatgggggttatgtggaaagtaccaccctgcagattcgaccggccacaaagacccagtgcacagaattcttcctcgcccctgtcaagactgaagttcccctagctgagaaccaaagaagtggtcccgactgtgcaggcagcttgaaagaagaaacaggcccgagctaccaaagggctccccaaatgcctgactcccaaagaggacgcgtggcagaagagctgatcttaagggagaaggtagaagcggtacagcctgggcctgtggttgagctgcaactgtccctttcacaggagagacataagggcgctagtggccctttagtggctctcccgggagctgaaaaatctaagtctcctgacccagaccctaacttgtcacatgacaggattgtccacataaattcgatccctactaatgagaaagcagaccctttcctgaggtccagcaagataatccagatctccagtggcagagagttgagagtgatccaggaaagtgaagcaggagatgcgggactgccccgggtggaagtgatcctcgactgctctgacaggcagaagacagaagggtgcaggcttcaggcaggaaaggagtgtgtggattctccagtggaaggagggcagtcagaagcacctccttctctggtatcctttgccgtctcatcagaaggcacagagcagggagaagatccacgctcggaaaaagatcacagcagacctcacaagcaccgagcgcggcatgcacggctcaggaggagtgaaagcctgtcagaaaaacaagtgaaggaagcaaaatctaaatgcaaaagcattgcccttcttctaacggatgctcccaaccccaactccaagggggtgttgatgtttaagaagcgacgtcggagggccaggaaatacaccctagttagctacggtactggcgagcttgagcgagaggcggacgaggaggaagaaggtgacaaggaggatacatgtgaagtagcatttcttggtgcaagcgaatcagaggtggatgaagagttattgtctgacgttgacgacaacacacaagttgtgaactttgactgggattctggactggtggacattgaaaagaaactgaacagaggggacaagatggagatgttaccagacaccacaggcaagggagccctcatgtttgccaagaggagggagagaatggatcagatcacagcccaaaaagaagaggacaaggtaggtggaacgccaagcagagaacaagatgctgcccagaccgatggcctgagaaccacgacttcttaccaaagaaaggaggaagagtcggtaagaacgcagagctctgtgagcaaaagctacatcgaggtgagtcatggtcttggccatgttccccaacagaatggcttcagtgggacatctgagacagcaaacatccagaggatggtccccatgaatagaacggccaaacccttcccagggtctgtgaatcagccagctacccccttctcgccaacccgaaacatgacgagtcccattgctgactttcctgcacctccaccttactctgcagtcactcctccccctgacgccttctccagaggggtttcaagtccgattgctggcccagcacagccccctccatggccccagcctgccccgtggtcccagccagccttttacgattcgtctgagcgaatagcttcccgagatgagaggatctcagtgccagcaaaaagaacaggaatattgcaggaggccaaaaggagaagcacgacaaaacccatgtttacttttaaagagcccaaagtaagcccaaatcctgaactcttgtcactccttcaaaattcagaaggcaaacggggcactggagctggaggtgattccggaccggaagaagactacctcagcttgggggcagaggcttgtaatttcatgcaaagctcctctgccaaacaaaagacccctcctcctgttgctccaaaacctgcagtcaagtcctcatcctcccaaccagtaactccagtttccccagtctggtctccaggagtggctcccacccaacctcctgccttccccacatccaacccatcaaagggcaccgttgtctcctccatcaaaatagcccagccttcttaccctcctgcccggcctgcaagtactttgaacgtggctggtcccttcaaaggaccacaagcagcagtagccagtcagaattacacacccaaaccaacagtttccacaccaacagtcaatgctgttcagcctggtgcagtgggaccatccaatgagcttccaggaatgagtgggagaggagctcagctctttgctaaaaggcagtcgagaatggagaagtatgtggtcgattcagacacggtgcaggcccacgctgctcgagctcagtctcccactccatctctcccggccagttggaagtactcctccaatgtccgagcacctcctcctgtggcctataatcctatccactcgccgtcttacccactggctgctctcaagtctcagccatcagctgcacagccctccaaaatgggcaagaaaaagggaaagaaacccctcaatgcattagatgtcatgaagcaccaaccgtatcagctcaatgcatccttgtttactttccaacctccagatgcaaaggatggcctcccccagaagtcatcagtcaaggtcaattcagccctggccatgaagcaagctcttcctccccggccagtgaatgctgcctcacctacgaatgtgcaggcttcgtcagtgtactcggtaccagcctatacctctcctccttccttctttgcagaggcctcctcaccagtcagtgcatccccagtgcctgtgggcattcccacctcgccaaagcaagaatcagcctcatcatcttattttgtggcaccaaggccaaagttctcagccaagaaaagtggtgtcacaattcaggtgtggaaaccatctgttgtggaagagtaatcttgtagctgaagctgagtgtccactttgcttgaaatgaattgtttgcagtgtttcttgagtccctgagaatgcctagcaaagtcctcaacttacttaatttcagatatgtcacctcctaatctgggtccaaggagtataatatttttaatgagtcaaaaatccaactcagattgacctaaaatatatttatcttctttgcacacttaaaaaatccaggagcaccccaaaatagacatgtaccgttatattaagtaagcaggagacttaggatttgtgctgtagccacaagaaagacagtgatcagtgatatcaaacatcaggaatcagcctttatgtaacataacagctgtcctcctatggtgaaaggttcaaatgtagtgaaggtataacctatattgactgagatttcccttttaggtagtgccttatctctattactagtgttaaaggaataaggaatctatgaaggacagggagcagctctggtctgtcaatctcagccacctgtttgatatcacagagaagatactcggaggattgttggaatgtatatagtttagtaagaagtgggtaagaaagagggtcttaattactgagcacttattatgtattaggttctttgccagatgtttttacatatataaactcatttcagaaaacttatttaaagtaaatggggccgggtatggtggttcatgcctggaatcctagcactttgggaggctgaggtaggaggactgcttgaggccgggagttggagaccagcctgagcaacatagtgagaccctgtctcaataataataataataatagtaataatgaagtaaatgggataaggaaagaaggataattatctttaaaggttgattcccaccctccctccccagttacttaaggaactaagtgagtacatctccagttgcccatgaaagcataagtttgttttcctcagctgaggcaagtggtagagtatacaggataacgaagtaacatgtaaaaggcaggacgcacataaaggtgtacatggctattgtttcacctggagaaaccacatgattgggacctgaaggtttactgactgactacaggggctgattgtgaagcacgaggaaccccatgtgtgtggagactgtagggtgagagcacacaattattagcatcatttctgagtgatctcacagattttttttcttgtgtttgctttgctttttgacaactgcttctcccacgttccttgcaattctattctctcaccttcactttactatttgtattcgatggaccaggataattcaggcaaggttaccttgtaaactttaattggccacacaccatgttgtcacccagctggctatgaagtgaataatggtactgaaagtaaacctgaagacctttctcagatctattttaagtctgagtctgaccaaccatggaaaatattcgacatgaattaatgtagagaactataaagcatttatgacagctccaagaaaaatcatctactctatgcaggagatatgtttagagacctctcagaaaaacttgcctggtttgagggtacacagtaccattttaatcttctgaaaatatctgtattcctgctctttttctgctgtcactgtcaatctgctatatttttcactatcctattaaaatattactgtctcctttatctgttcaatgtccatattttaaaaaaatcttccttgtatgagctattctgatctaaataatttctctgatatttctctatatggctcccacaacaatttcattgttgttagcatatctatttctccatacattgtaaaactgtaatccttaggtatttctaaaacataaagaggagaattaagtcagctgcagaacaatggggctgattcttctgctttttctctggaaaatctttcattgcttttggtggaaatttacctagaggttacaaccacaggatgtagcttggtctcttatttgcctttttgggaaaccaattaagattaatacaggataaaggaaaaaagcaatctattcattatataacacagttgtttgtattacttgttccctgcaaaggaaatctgttgaatgcttgcattttgaattcttttctaatagaacaaccaaaaaaggcttcttatggtgcagcaggaaaaaagatcatttttatagctttgcattcttaacatagcatttaaagagcggcatgaattagaggaaagacatggaacacacaggtagtcggtttgagatcatcggcttaaaagtatcctaggatggtaatgacccagaagtatttccagttgtctagtggtgtggtatgcaggaatgagaagtgttttctttccatttcctgttggacaggtggcaatcttagcagagccactatttggagttgataactaaagatgcaaataacatgactatgccttctggtcatcctaggactatttggagttctccaaaaccttgtaagaggcatgtcaggcatgcagtaaaagcatctacaacttcagctgggcactggcagcataggtctcatcttggaccatacagtcccactttatagaagagggtggaagttctccaaaacaatatccacaacaaagtctgacctcactctgagggagatgggaagtgggaggaagaaggactaaccagctccctggagtaagaggaatttgctttccctgtctgcccaccaggggctatatgtgccacctttcaggttggggccaaggaagtgatgtcagtgtgacagaagggagagttagacctccagacgtcagcctccctcccatggggtacattttcaatctgagtgttgttgccttagctgtgttggtattagcttgattggttggtccgctggttatgaggtgtagggaggcagtttttgtttagtttttaggactttgcctcttcctttgtccttagcataatttctaggcagagcatccacgaagtcggttttcattgccagctcaagagcgacaatcatttacgagttcctatgttatgttaggtgccttatgtatattatcccaaatccactgcatggtttaaatacaggcactggaatataaatgaaaaaggtcattacagtcactgactttctgcaggaccttaaacatttctctttccacaagtttccccttaatcatgtgtcaaacctctcttcctgacgggaatgttgtgctataatgaatctgcataacgcttgggattctaggaggaaggaaggttccatggacatgtaagtacagcatattcccctcagtcttctaggagggcagagtgaatcccagaactggtaagattgggaatctgagcattgccactttaatcttagaatatttatcattttgacacatcctgttttttagagaggaaaacaaacacagtttctgcattggtagtgtaaagcataccttgttaggaacgtgttttgtaagacacatttgggttgtcactctagagcatgtcaaactttgtacttcaaaatatatttagtatgattgttagtggtaacatatatcaaggctttgaattaactgttttatttaattttcacaagaagcacttattttagccataggaaaaccaatctgagctacaaatagttctttaaaataagcccaggttatttagctattctagaaagtgccgacttctttcaagaagcaggcattgtaggacagctgagaattatcacatagcctaaattctagcctggcagcaagagtcacatctgagatgtccaaaaaaaaaaaaaaaacacctgatctacattgaaagggggtagactaacgtatgtgagaccattttcctatttgcagttacaaggttaaagaactttgaaggtcattcggctgctaagaggcatgtcgaacactctgtgtggctctttcacagtaaaccctcctaagagcagaagacacatggctgttagtgtctgcgtttagatttaatttctcaaataaaggcccttggctgcgtatcatttcatccagttataaactagggctcctgcaagcacccccattctaagggtgaattattgaaatcagttgctatttgatgagtcacaactggcccagcaggcagggcatttgaagtcatggtcatcaaaaagaaatgattgttttttgaaaagctaaatgcttaaaatgcttctagagggaagtcgtggggcgtgtgctcattctctttaaaatcagggttgttgagtttgtttttaaacatttttataagttcatgagaaaaaatatataaattctaagaaccaacactgtattcccagaaacatgaccctcgctggtcttgggtccacatatcattggactctgggggacacaaagatgcctgtgacactttggtgttgccgagttagtcaacaattattctgggaaaaagcagaattgaattcttctctagatgtcctaccagggttggccaagggccacaaagcaggctaataaattcccacaggatccagacaccaggcaaaattgctctaagaagccagttactgtcatccctctatggttctagaaaaaatagtacaaaaatgacaggtcatcctatgagcgtcatgccaatgaaaccccatcttctggagaagcccttgaatcagaattatcttttttcttgatgtcgtcagatgcagccagtttcttaatttttttaaaaactgtatgtttctgtggtatgtatatttgtacacctaactacctggcacttggaaatcacagcactactcagaggcaattgaataaagagaaatttaattttaaatatcaagtcctgtcaaacatttctcaaacttctgattttatcaaaggtttgccagccaataaagtgcatcccaagtatacaggggagaaagctagactcctacagggtcctagagtttaagtaatttttttgttattaatataggtaataatttttctaatttttattttttggttccaaatgtaaagctccttgtgtttacctctgtttatgtcattcttgacatgtttatctaaattatgtgtgctctgtgacaggtgaaatgtaaatctgggatccatagtcaagatatcataaggacctacttcccagcctacctttcttcctctacctgataatgataatactcaaaataacaacattcaaaggaaacacaaagaaatcctgctttcacatctcctatttcttgggctccttaataactactgatggtttgttcatgaaaaaaaatttttaaatcaaaagattgtacttggccctgagttgaaaaaatttcaaaaatcaaaagtttgtacttggccctgagttgaaaaaaaaaattcacattctaagaataaacagaaaaatgttcttcttggaagtaaataacaaaagccatagtgttttcatttgtcttttcttcaggatacacggtagaagtcagagaatctttgatacttttatttggtgcaataatcaaggccatgcaacaacccaaaatcaagcattttggttcaagtcaggatgacatgagtggggacagaagctgtggcagtcattcaaataatctcatgggtcctgaggaaaagacaggagttaatgtattaagtttctactatatgcaggaactgtgttaaatattttacataagttttgataatagctaacattagctgagcacaaaatttgggccctgatttgtgctgagtatctttcacagattactgcttttaatcagcagtccttgtgagctaggtatgatcattatccccattttatagattacagatgagattctgaggcacaaagaggctaagtaacttgccaaagatcatacgatgttaagtaatggcccctggattcagtctgcagcctgaattcttaaccaattatactgtgatttcattattcttcagaattacactaaaaagaaggtattattcccattttacagatgaggtatctaagctcagagaagctaaacaacttgtgcaacaatcactaagcttataagcagtggattagggttagatttagatatttgtctggcatccaaacctgtgctctccctacagtaccacatggtttccacagtctcatcagaccccggaatttcactccctgagactgcttaattgtgaatttcccaaactgattcaccaagagcctactgtctctgctttgtagatagctttgaccacattcaatgacattaggaaagactccatttcccaagatggctcagaaaatcagatgctatgacgcatgttgaaagtgaaaacccatctctgagaaagaagcatctgttttattagtaaaaaaaaaaaatgaaatttacagcaatgttgtgtgacttctcaaaattctttcattttcttatttcagaatgaatagtgttgttcgttggctgggaatggggaagaatgtgatttttaaaaataaagcataatcaaactctgcaaaaaaaaaaaaaaaa

SEQ ID NO: 71 - DNA, 1182 bp, Homo sapiens
gcggccgcaccccccggccgggccgtgcttctgcccctacaaggtttgggccgaggtgggggagggtcctggttgccggccccgcccggtccctccccgccttttaggcgcccgcgtggccgggacgtcccagtcccgctccgtcctcctcgcctgccaccggtgcacccagtccgctcacccagcccagtccgtccggtcctcaccgcctgccggccggcccaccccccaccgcagccatggacgccatcaagaagaagatgcagatgctgaagctggacaaggagaacgccatcgaccgcgccgagcaggccgaagccgacaagaagcaagctgaggaccgctgcaagcagctggaggaggagcagcaggccctccagaagaagctgaaggggacagaggatgaggtggaaaagtattctgaatccgtgaaggaggcccaggagaaactggagcaggccgagaagaaggccactgatgctgaggcagatgtggcctccctgaaccgccgcattcagctggttgaggaggagctggaccgggcccaggagcgcctggctacagccctgcagaagctggaggaggccgagaaggcggctgatgagagcgagagaggaatgaaggtcatcgaaaaccgggccatgaaggatgaggagaagatggaactgcaggagatgcagctgaaggaggccaagcacatcgctgaggattcagaccgcaaatatgaagaggtggccaggaagctggtgatcctggaaggagagctggagcgctcggaggagagggctgaggtggccgagagccgagccagacagctggaggaggaacttcgaaccatggaccaggccctcaagtccctgatggcctcagaggaggagtattccaccaaagaagataaatatgaagaggagatcaaactgttggaggagaagctgaaggaggctgagacccgagcagagtttgccgagaggtctgtggcaaagttggagaaaaccatcgatgacctagaagagaccttggccagtgccaaggaggagaacgtcgagattcaccagaccttggaccagaccctgctggaactcaacaacctgtgagggccagccccacccccagccaggctatggttgccaccccaacccaataaaactgatgttactagcctctcaaggccctttaatcctt

SEQ ID NO: 72 - DNA, 7158 bp, Homo sapiens
tcctagtgagtatcgagttggtcttattatcgcgtgaactgggagcctttgtttcctgcgtgtcgcaggaagtgacgtttcgggtacagccgctaccagagtccctttctcgcgaggcggaagaaccccgatcgctgaggagcaagggggcgctaggaaagggaactgggttgcgacggtccggcgagagagagctggggtgctggggtgcggggaagttggggagcagaggccgcttggtgtccgagtagggtaagaccgcaccgacccagtccgttaggaaagaagggaaacgaggcaattgtcgggcggatccccggacggagggctaaggttgtgtggaaggcgctgctccccggatggcgaccgcagatactccggccccggcctccagtggcctctcgccgaaggaagaaggggagcttgaagatggggaaatcagtgacgacgataataacagccagatacggagtcggagcagcagcagcagcagcggcggcgggctgttaccctatccgcggcgaaggcctcctcactcggcccggggcggtggatctggcggaggcggtggctcttcctcgtcatcgtcctcttctcagcagcagctgaggaatttctcacgctcgcggcacgcgtctgagcggggccacctcaggggacccagcagctaccgacccaaagaaccgttccggtctcatccgccttctgtacggatgccttcgagctcactgtccgaaagcagtccccggccgtctttctgggagcggagccacctcgccttggaccgtttccgctttcgaggcaggccttaccggggtgggagtcgctggagtcgggggcgaggagtgggtgagcgaggaggcaagccggggtgcagacctcctctgggaggaggagcaggatccgggttcagcagcagtcagagctggcgagagccctctccacctcggaagagctccaaaagttttggaaggtctccatcaagaaaacaaaattattcatcaaaaaatgaaaactgtgtggaagaaacttttgaagatttgcttttaaagtataaacaaatacagttggaactagaatgcatcaataaggatgaaaaactagcattgagtagcaaagaagagaatgtgcaggaagatcctaaaacattgaacttcgaggaccaaactagcactgataatgtcagtattacaaaggattcaagtaaagaagtagctcctgaggagaaaacacaagtcaaaacttttcaggcatttgaattaaaaccactcaggcaaaaattgactttaccaggagataagaaccgtttgaaaaaagttaaagatggagcaaaaccactttccctgaaatccgacactactgattctagtcaaggattacaagataaagaacaaaatttaacaagaagaattagtacctcagatattctgtctgaaaagaaacttggtgaagatgaagaggaactatctgaattacagcttcgccttttggctcttcagtcagccagtaaaaaatggcaacaaaaagaacagcaggtgatgaaagaaagcaaagaaaagttgactaagacgaaaactgtacagcaaaaagttaaaacaagtacaaaaacacattcggccaaaaaagttagcactacagctaaacaagcattgaggaagcagcaaacaaaggcatggaagaaactacaacaacaaaaagagcaggaaagacagaaagaagaggatcagcggaaacaagctgaagaagaagagagaaggaaaagagaggaagaaatcagaaaaattcgagatctctcaaatcaggaagaacagtacaatcgattcatgaaattggttggtggcaagaggagatcaagaagtaaatcttcagatcctgacctgaggcgatccttagataagcaacctactgatagtggaggaggcatttatcagtatgataactatgaagaagttgctatggatacagatagtgaaaccagttctccagctccttcaccagtgcaaccgccatttttctctgaatgttcattggggtatttttctccagcaccatctctttctttgcctccaccacctcaggtttcttctctgccacctttgagccagccttatgtggaaggcttgtgtgtttctcttgaacctctacctcctctaccaccattaccacctctcccacctgaagatccagaacagcctccaaaaccaccttttgcagatgaggaagaggaggaagaaatgctgcttcgagaagaactacttaaatctctagcaaataaaagagcttttaagccagaggaaacatccagtaatagtgacccaccttcacctccagttctgaacaattcacatcctgtgccaagaagcaatctatcaatagtcagtattaacacagtgtctcagcctaggatacagaatccaaagtttcacagaggaccccgtcttccacgaactgtgatctcgcttccaaagcataaatcagtggttgtaacactaaatgattcagatgatagtgaatctgatggagaggcttccaagtcaacaaatagtgtttttggtggattagagtccatgattaaagaagcaagacgaactgctgagcaagcttcaaaaccgaaagtacctccaaaatctgaaaaagaaaatgatcctctgcgaacaccggaggctttgcctgaagaaaagaagattgaatatagattgttaaaggaagagattgccaaccgtgagaaacagcgtttgattaaatcagatcagctgaagacaagttcatcatccccagcaaactctgatgtggaaattgatggtattggcaggatagcaatggttactaagcaggttacagatgcagaatcaaaactgaaaaaacataggattctcttgatgaaagatgaatctgttttaaagaatttagtgcaacaagaagctaagaagaaagaatctgttagaaatgctgaagcaaagattacaaaacttacagaacagcttcaagcaactgaaaaaattcttaatgttaacagaatgtttttgaagaagcttcaggaacaaattcacagagttcaacagcgtgttacaattaagaaagctttgactctaaaatatggagaagagcttgctcgggcaaaggcagtggccagtaaagaaataggaaaacgtaaactggaacaagatcgctttgggccaaacaaaatgatgagactggacagttctccagtatcaagtccaagaaagcattcagcagaactaattgctatggagaaaagacggttacaaaagctagaatatgaatatgccctgaaaattcaaaaattaaaagaagcccgtgcccttaaagcaaaggaacaacaaaatatctctccagttgtggaagaggaacccgaattttctttacctcaaccctcacttcatgatctgacacaagataaattaaccctggacactgaagaaaatgatgttgatgatgaaattttgtctggttcaagcagagagcgaagaagatcttttttagaatccaattattttactaaacctaaccttaagcacactgatactgctaacaaagaatgcataaacaaacttaataaaaatactgtagaaaaaccagaactttttctagggttaaaaattggtgaattgcaaaaattgtattcaaaagctgacagcctaaaacagctgattttaaaaaccaccacaggcattacagagaaggttttgcatggtcaggagatttctgtagatgtggattttgtcacagcacaaagtaaaacaatggaagtgaagccatgtccttttagaccctaccatagtcctcttctagtttttaagtcctacagatttagtccatattatcgaaccaaggaaaaacttcccctgagctcagtatcatacagtaatatgattgaaccggatcagtgtttctgccgttttgatttaacaggaacatgtaatgatgatgattgtcaatggcagcatatacaagactatacacttagccgaaaacagttattccaggacattctgtcatataatctgtctttgattggttgtgcagagacaagtactaatgaagaaattactgcttcagcagaaaaatatgttgagaaactttttggagtaaacaaagatcgaatgtcaatggaccagatggctgttctccttgttagcaatatcaatgaaagtaaaggtcatactcctccatttacaacctacaaagataaaagaaagtggaagccaaagttttggagaaaacctatttcagataatagcttcagtagtgatgaggaacagtctacaggaccaattaagtatgctttccagccagagaaccaaataaatgttccagctctggatacagttgtcactccagatgatgtcagatactttacaaatgagactgatgacatcgctaatttagaagcaagtgtgcttgaaaatccttctcatgtacaactttggctcaagcttgcgtacaagtacttgaatcaaaatgagggggagtgctcagaatccttggattctgctttaaatgttctggcgcgagcattggaaaataacaaagacaatccagaaatttggtgccattacctcagattgttctcaaaaagaggaaccaaggacgaggtgcaggaaatgtgtgaaacagctgttgaatatgctccagattatcaaagcttttggacttttctacacctagaaagtacctttgaagaaaaggattacgtatgtgagagaatgttggagtttctgatgggagcagccaagcaggaaacatccaatattttgtcctttcagcttttagaggctcttttgtttagagttcagctgcacatatttactggaagatgccaaagtgcactggcaattttacagaatgcattgaaatctgctaatgatggaatagtagctgaataccttaaaaccagtgatcgatgtttggcatggttggcctacatacatcttattgaattcaacattctcccttcaaaattttatgatccatctaatgataatccttcaagaattgttaacactgaatcatttgtaatgccatggcaagctgttcaagatgtaaagactaatcctgacatgttgttagcagtttttgaagatgcagtgaaagcttgcacagatgagagccttgctgttgaggaaagaatagaggcctgccttccactttacacaaacatgattgctctgcaccaactcctggagaggtatgaggctgcaatggagctttgtaaatctttattggaatcatgtcctattaactgccagttgctggaagctcttgttgcattatatttgcaaacaaatcagcatgacaaagccagagcagtgtggcttactgcatttgaaaaaaatcctcagaatgcagaggttttttatcatatgtgcaaattcttcatcttacagaatcgaggcgataatcttcttccatttttgcggaaatttattgcatccttctttaaaccggggtttgagaagtataataacttggatctgtttcggtatctcttaaatattccaggaccaattgacattccatctcgtttatgtaaagggaattttgatgatgatatgtttaaccaccaagttccttatttgtggctgatttactgcctttgtcatcctcttcaatcaagtattaaagaaacagtggaggcatatgaggcagcattaggggtggctatgagatgtgatatagtacagaagatatggatggattatcttgtctttgcaaataatagagctgctggatccagaaacaaagttcaagaattcaaattttttactgatttagtgaatagatgtttggttacagtccctgcccgataccccattccttttagcagtgctgattactggtccaactatgaatttcataatagggttattttcttttatttgagctgtgttccaaagacccagcattccaaaaccttggaacggttttgttcagttatgccagctaattctggacttgcattgaggttacttcaacatgaatgggaagaaagcaatgttcagattctgaaacttcaagccaagatgtttacatataatatcccaacatgcctggccacctggaaaatagccattgctgctgagattgttctaaagggacaaagagaggtccaccgtttatatcagagagccttacagaagttacctctttgtgcatcactgtggaaagatcaactcttgtttgaagcatcagaaggaggtaaaactgataacctgagaaaactagtttccaagtgccaagagattggagtcagcctaaatgagctcttaaatttaaacagtaacaaaacagaaagcaagaatcactgaacactgggtgcagtcagttctaagtccttataataattgccaaaattatttgaatgattcttcaagattaggctgatccctggctaaggtctgtgtaaggcagacaagcgttattgatcatatcaagttccctacaatatcctgtcctcaaaaccggaagcaatgaacatgatcctcttcggttggataaatgaacttcctgtttggcctgcttctaggccctgccagattctcataacatcatatacgtaagtatagttcctcaaagtgactgacatttattttaattttgctttgtttttttttattttctcccccattcctttattttgtgttattcctgactcacttgacactctctgatgcctgagagattcctgtttgggatttaatatccagggctgtgtttacagtaaaaaaagcaggcagtcccttttagtttttcctttttaaatttttttgagattcttcatttcaggatttaaaactatagcagtccatcttaaggaaagtgtaactgccatggccacaagtctgctagttgcacttgaatgctctatcagggttgtttattaccctttctacgttctggactccttgccgagactgtttaacttgaagattaaagaaactattgcaaatgccagtgcatcagaacctaagagtggtcaaatattatgtgcaatttttttgtaaagaaattttaatttataataaagtttaacagtttaaagaacagttaatatttgaactgctttgtattgaaatactactttgtagtattgaaattgtttatatacttttttaatataagttaactttctaaaaa

SEQ ID NO: 73 - DNA, 4336 bp, Homo sapiens
agttcgccctgccggaaagcagcacgccgccgcggcattttacgacgtcggcggtgacaggccctgggactctgggaatacccagcttcctccccgcaacccggtgaaagccaacgcaatgttcggtgcgggggacgaggacgacaccgatttcctctcgccgagcggcggtgccagattggcctcactttttggactggatcaggcagctgctggccatggaaatgaatttttccagtacacagccccaaaacagcctaagaaaggccagggaacggcagcaacaggaaatcaggcaacaccaaaaacagcaccagccaccatgagcactcccacaatactggtcgcaacagcagtccatgcatatcgatacacaaatggtcaatatgtaaagcagggcaaatttggtgctgcagttctggggaaccacacagccagagagtataggattcttctttatatcagtcaacaacagccagttacggttgctaggattcatgtgaactttgagctaatggttcggcccaataactatagcaccttttatgatgaccagagacagaactggtccatcatgtttgagtcggaaaaggctgctgtggagttcaataagcaggtgtgcattgctaagtgcaacagtacctcttccctggatgcagtgctctcccaggacctcattgtggcagacggccctgctgtagaagttggagattctttggaagtggcctataccggctggctctttcagaatcatgtgctgggccaggttttcgactccactgctaacaaagataagttgcttcgcttgaagttaggatcaggaaaagtcatcaagggctgggaggatggaatgctgggcatgaaaaaaggaggaaagcgattgcttattgtccctccagcctgtgctgttggctcagaaggggtaataggctggactcaagcaacggactcgatcctggtgttcgaggtggaggttaggcgggtgaagtttgccagagattctggctctgatggtcacagtgttagttcccgcgattctgcagctccgtctcccatccctggtgctgacaacctctctgctgatcctgttgtgtcaccacccacatcaatacctttcaaatcaggggagccagctcttcgtaccaaatctaactccctcagtgaacaacttgcaataaatacaagtcccgatgcagtcaaagccaagttgatctctcggatggctaaaatgggccagcccatgctgcccatccttccaccacagctggattccaatgattcagaaatcgaagatgtgaacactctgcaaggaggtgggcagcctgtggtgactccgtccgtccagccctctcttcatccggcccatccagcgttaccacagatgacctcacaggcacctcagccatctgttactgggctccaggcaccttctgctgccttaatgcaagtgtcatctctcgattcccactcagctgtatctggaaatgcccaatcctttcagccctatgcaggtatgcaagcctacgcttatccccaggcatctgccgtcacctcccagctgcagcccgttcggcctttgtacccagcaccgctctctcagcctccccatttccaaggatcaggtgatatggcttcatttctcatgactgaagcccggcaacataacactgaaattcgaatggcagtcagcaaagtggctgataaaatggatcatctcatgactaaggttgaagagttacagaaacatagtgctggcaattccatgcttattcctagcatgtcagttacaatggaaacaagcatgattatgagcaacatccagcgaatcattcaggaaaatgaaagattgaagcaagagatccttgaaaagagcaatcggatagaagaacagaatgacaagattagtgaactaattgaacgaaatcagaggtatgttgagcagagtaacctgatgatggagaagaggaacaactcacttcagacagccacagaaaacacacaggcaagagtattgcatgctgaacaagagaaggccaaggtgacagaggagttagcagcggccactgcacaggtctctcatctgcagctgaaaatgactgctcaccaaaaaaaggaaacagagctgcagatgcagctgacagaaagcctgaaggagacagatcttctcaggggccagctcaccaaagtgcaggcaaagctctcagagctccaagaaacctctgagcaagcacagtccaaattcaaaagtgaaaagcagaaccggaaacaactggaactcaaggtgacatccctggaggaggaactgactgaccttcgagttgagaaggagtccttggaaaagaacctctcagaaaggaaaaagaagtcagctcaagagcgttctcaggccgaggaggagatagatgaaattcgcaagtcataccaggaggaattggacaaacttcgacagctcttgaaaaagactcgagtgtccacagaccaagcagctgcagagcagctgtctttagtacaggctgagctacagacccagtgggaagcaaaatgtgaacatttgttggcctccgccaaggatgagcacctgcagcagtaccaggaggtgtgcgcacagagagatgcctaccagcagaagctggtacaacttcaggaaaagtgtttagccctccaggcccaaatcacagctctcaccaagcaaaatgaacagcacatcaaggaactagagaagaacaagtcccagatgtctggggttgaagctgctgcatctgacccctcagagaaggtcaagaagatcatgaaccaggtgttccagtccttacggagagagtttgagctggaggaatcttacaatggcaggaccattctgggaaccatcatgaatacgatcaagatggtgactcttcagctgttaaaccaacaggagcaagagaaggaagagagcagcagtgaagaagaagaagaaaaagcagaagagcggccacgaagaccttcccaggagcagtcagcctcagccagttctgggcagcctcaagcacccctgaatagggagaggccagagtcccccatggtgccctcagagcaggtggtcgaggaagctgtcccgttgcctcctcaggccctcaccacttcccaggatggacacagaaggaaaggggactcagaagctgaggcactctcagagataaaagatggttcccttccacccgaactgtcttgcatcccatcccacagagttctagggcccccgacttcaattccacctgagcccctaggccctgtatccatggactctgagtgtgaggagtcacttgctgccagcccaatggcagctaagcccgacaacccatcaggaaaggtctgtgtcagggaagtagcaccagatggcccactacaagaaagctccacaagactgtccctgacttcagaccccgaggagggggacccactggccttagggcctgaaagcccaggagagcctcagcctccacagctcaagaaagatgatgtcactagctccaccggtccccacaaggagctgtcaagcacagaggcaggttccacagttgcaggagcagccctcagacccagccatcattcccagcgttccagtctctctggggatgaagaggatgaactgtttaaaggggcaactctgaaagctctgaggcccaaagcacagcctgaggaggaggatgaagacgaggtgagcatgaagggacgcccgcccccaacgcccctttttggagatgatgatgatgacgatgacattgactggctgggatgaagacccaggaaactggtgcaaaggtttctctgcaacccttccctaagcatgattttgcacagccaaccctgggtctaggcgaaccacagggtgaggtcaaggtgagcattctgggaacaatatttgggctcagagggtgggttggccaccttctgagccccacccccgccagacctggtgaagaggatcataaccctgtcttcaagaacactgggatttcagcagcaagttggaagaaggactggtaggttcccctccaagccagtcacctgtaagagtcctgtcctctgccagactttttaatctcttcattaactctcagactgacctgggagccctcctctacctgaatccagtgctcaactgtgccccggcaacaagacctgggctgaggtctccctggtagaactaagggagattacaccatctaaatcccagtgcagtcaacagcctggcctatagtcctgggacatgtatcttcttctttgccttaaatctgatacaagaggtcaatgactttgaaaataaaactaaaataaatgtctataatgaaacttg

SEQ ID NO: 74 - DNA, 1496 bp, Homo sapiens
gtctaagccccgccctttcctgtcgtgacttaacgcacgcaagcggctccagggtacgtccccgccacgcgcgctcgcaggatcggtgcgtggtgacgtttcgccggcgcgggcgccatcccggaagcgcgagcaaggccgccagatgtgcaggtgccgccgctaccgacgccggggccgagtttggggcagcggaggaggagaaagagatggacctcccggactcggcctcgagggtcttctgcggccgcatcctgagcatggtgaacacagatgatgtcaacgccatcatcctggcccagaagaacatgctggaccgctttgagaagaccaatgagatgctgctcaacttcaacaacctgtccagtgcccgcctgcagcagatgagcgaacgcttcctgcaccacacgaggaccctagtagagatgaaacgggacctggacagcatcttccgccgtatcaggacgctgaaagggaaactggccaggcagcacccagaggccttcagccatatcccagaggcatccttcctggaggaagaggatgaagaccccatcccacccagcaccacgaccaccattgccacctcagaacagagcacgggctcatgtgacaccagccccgacaccgtctcgccctccctgagccccggcttcgaggacctgtcccatgtccagcctggctccccagccatcaacggccgcagccagacagatgacgaggagatgacgggcgaatagccctgctgcccggtgccttgagggggtctcagggcagcagcatacaaggtggcagcgggtaaccctgccttgttctgtcatccagggctcctttgctgccccgttctgtcacccagggctcctagggggacaaggctctctcccgaggggtgtggaattcctgggggggtctttaattctggctccttccttcctcagaacatctctattctgcaagacccctctgccatgccagggcacgcccattccagctggagtcgtggggctgggcacaggggaatttttccagagctgagcctgacgtctgctctgaagaatgcttagaaggttcccagacaccagagccagatgtcccccaccaccggtcaggacctccttgaggtgcacaagcacggtctcctctgagttcaccccagcccacccccgcacccactaattctgcttttcctgccccttgctccgtaaaagtatcaaatactttctccttggtatctcaaggaggtttctgagataggtagaagtcttgagacggaggctggccatccattcagccctgagcgtgctgagttctgtgtttctctgaatagaggtgtggaacctgaggggccagcaggcctctctgaaggcctccatggagcaaacggagccacctcgggaaagagtttaatggaatatttttgtacccgatgtttacagatgctgttgggaagttatcaataaaaagacaccattactaaaaagggaaaagtacaccta

SEQ ID NO: 75 - DNA, 1874 bp, Homo sapiens
caggccttaaaggggccgcaactatttttttaagccactttttcctctctccaattttgcaacgacgggcgcggaggaggaggttcccggaagccacgcgcagctggagcagcggcgaccgcagctggaggcccggagcgcctgcggggctggcagaggcgagggaggttgcgggtaggaagggcggactgcgcgcgccccctgcgtcccgcgcacctcggggccggtccatgctcccgacggctgcgggcttcagcatctggggccaggttggggcggcggggtccagggcgcaggtggtgcggccgatgcgccgggccggaggctgaggccgcgctgcggggctgggacagcactggcatctccagagcaggcccggggcagcaagggaggcgccgcgatgccagacgaaaatatcttcctgttcgtgcccaacctcatcggttatgcccggattgtcttcgccatcatttctttctacttcatgccctgctgccccctcacggcctcctccttctacctgctcagcggcctgctggacgctttcgatggacacgctgctcgcgctcttaatcaaggaacccggtttggggccatgctggacatgctgacggaccgctgctccaccatgtgcctgttggtcaacctggccctgctgtaccctggagccacgctgttcttccaaatcagcatgagtttggatgtggccagtcactggctgcacctccacagttctgtggtccgaggcagtgagagtcacaagatgatcgacttgtccgggaatccggtgcttcggatctactacacctcgaggcctgctctgttcaccttgtgtgctgggaatgagctcttctactgcctcctctacctgttccatttctctgagggacctttagttggctctgtgggactgttccggatgggcctctgggtcactgcccccatcgccttgctgaagtcgctcatcagcgtcatccacctgatcacggccgcccgcaacatggctgccctggacgcagcagaccgcgccaagaagaagtgacgctggagccccgggtcctggctgcccacctgccctgggagtcttgctgtgccacacagctccccaccccctgctaggaggtcccagtctcacgccttcctcatgtgttgttctacctgctgggatgggggtcagcctctctttggtgacgtcacgttctctgggatcctgaggacccgggcctcaaatcagggaggatacgcgggaggccccctccatccaggcggtgctcctggggtgccgggaccgggcagtgtcacaccctgcctgctcagtcctggggtccgagatgctagggacgcttgagtgagggaggtggtgtgagggccaggtttcctgaaaggcgggagtcagacctccgcccccagccagagcaagcttggggcaccatgcccaggagggaagaagccatccacagccttccctgtcaccggctcctctgtcctgcctaccctggtcctggcgggacttcactatttgacttggtttcctttcagatattcttggctcagggcctgggttgagggagcttagggaaggacgtccgtctgggtgcttttcctccagtttgctggctggcttctccgtctacccacagtgacctcacagagaggccctcctgccacccatgctcatgtggtgtccccaccgcccacttgtttgatgtcactgactgtctacatgtatttatattcttgatattttctaccctcactagaatgtaaactccatgaaggcacagacttttcttgttctcttctctatccctagagtaagaccaacttgaacctggcatatagtagctgcttaataaatactcgtctgtcaatga

SEQ ID NO: 76 - DNA, 20 bp, Artificial Sequence
  Description of Artificial Sequence: Synthetic oligonucleotide
acttcggagttttgccattg

SEQ ID NO: 77 - DNA, 19 bp, Artificial Sequence
  Description of Artificial Sequence: Synthetic oligonucleotide
acggaaaccagcttcatcc

SEQ ID NO: 78 - DNA, 19 bp, Artificial Sequence
  Description of Artificial Sequence: Synthetic oligonucleotide
aggtgggtgaggaaatcca

SEQ ID NO: 79 - DNA, 20 bp, Artificial Sequence
  Description of Artificial Sequence: Synthetic oligonucleotide
gctccaggtttgactgtggt

SEQ ID NO: 80 - DNA, 20 bp, Artificial Sequence
  Description of Artificial Sequence: Synthetic oligonucleotide
gtcctggccaagagctacaa

SEQ ID NO: 81 - DNA, 21 bp, Artificial Sequence
  Description of Artificial Sequence: Synthetic oligonucleotide
ctaggccatctatggctttca

SEQ ID NO: 82 - DNA, 20 bp, Artificial Sequence
  Description of Artificial Sequence: Synthetic oligonucleotide
ccgcatcaaacagagtgaac

SEQ ID NO: 83 - DNA, 20 bp, Artificial Sequence
  Description of Artificial Sequence: Synthetic oligonucleotide
gtcacccttcaggtcctcat

SEQ ID NO: 84 - DNA, 20 bp, Artificial Sequence
  Description of Artificial Sequence: Synthetic oligonucleotide
tccagttccgatttgtaggc

SEQ ID NO: 85 - DNA, 20 bp, Artificial Sequence
  Description of Artificial Sequence: Synthetic oligonucleotide
gtcgcttttgggattacctg

SEQ ID NO: 86 - DNA, 20 bp, Artificial Sequence
  Description of Artificial Sequence: Synthetic oligonucleotide
taccagctcaccaagctcct

SEQ ID NO: 87 - DNA, 20 bp, Artificial Sequence
  Description of Artificial Sequence: Synthetic oligonucleotide
aaagtccacgctcaccatgt

SEQ ID NO: 88 - DNA, 20 bp, Artificial Sequence
  Description of Artificial Sequence: Synthetic oligonucleotide
atcccagtcccacttgtgtc

SEQ ID NO: 89 - DNA, 19 bp, Artificial Sequence
  Description of Artificial Sequence: Synthetic oligonucleotide
aaacatggtccctggcagt

SEQ ID NO: 90 - DNA, 20 bp, Artificial Sequence
  Description of Artificial Sequence: Synthetic oligonucleotide
gaaccttgggaaactgtgga

SEQ ID NO: 91 - DNA, 20 bp, Artificial Sequence
  Description of Artificial Sequence: Synthetic oligonucleotide
catttggtcaccctttggac

SEQ ID NO: 92 - DNA, 20 bp, Artificial Sequence
  Description of Artificial Sequence: Synthetic oligonucleotide
tcacaagcaatccaaagctg

SEQ ID NO: 93 - DNA, 20 bp, Artificial Sequence
  Description of Artificial Sequence: Synthetic oligonucleotide
ttgggacagtaggcatttcc

SEQ ID NO: 94 - DNA, 20 bp, Artificial Sequence
  Description of Artificial Sequence: Synthetic oligonucleotide
cgagcagagagggagtagga

SEQ ID NO: 95 - DNA, 20 bp, Artificial Sequence
  Description of Artificial Sequence: Synthetic oligonucleotide
ccacagacagctgagttcca

SEQ ID NO: 96 - DNA, 20 bp, Artificial Sequence
  Description of Artificial Sequence: Synthetic oligonucleotide
tagccgttcactccgctatt

SEQ ID NO: 97 - DNA, 20 bp, Artificial Sequence
  Description of Artificial Sequence: Synthetic oligonucleotide
ggagaaaagggcttctggat

SEQ ID NO: 98 - DNA, 20 bp, Artificial Sequence
  Description of Artificial Sequence: Synthetic oligonucleotide
ccagccatgaattacgacaa

SEQ ID NO: 99 - DNA, 19 bp, Artificial Sequence
  Description of Artificial Sequence: Synthetic oligonucleotide
cgggctcacacacaaactt

SEQ ID NO: 100 - DNA, 21 bp, Artificial Sequence
  Description of Artificial Sequence: Synthetic oligonucleotide
catacaggctgaaatcctcca

SEQ ID NO: 101 - DNA, 20 bp, Artificial Sequence
  Description of Artificial Sequence: Synthetic oligonucleotide
tgacacggataaacctggaa

SEQ ID NO: 102 - DNA, 21 bp, Artificial Sequence
  Description of Artificial Sequence: Synthetic oligonucleotide
tggccatctcaatggagttta

SEQ ID NO: 103 - DNA, 19 bp, Artificial Sequence
  Description of Artificial Sequence: Synthetic oligonucleotide
ataccaccgggttttccaa

SEQ ID NO: 104 - DNA, 20 bp, Artificial Sequence
  Description of Artificial Sequence: Synthetic oligonucleotide
tggaattgctgttcctgatg

SEQ ID NO: 105 - DNA, 22 bp, Artificial Sequence
  Description of Artificial Sequence: Synthetic oligonucleotide
ggttgccattttgttaggattc

SEQ ID NO: 106 - DNA, 20 bp, Artificial Sequence
  Description of Artificial Sequence: Synthetic oligonucleotide
gtctgtcctcccaggctcag

SEQ ID NO: 107 - DNA, 18 bp, Artificial Sequence
  Description of Artificial Sequence: Synthetic oligonucleotide
gaaggcctcatccctgtg

SEQ ID NO: 108 - DNA, 20 bp, Artificial Sequence
  Description of Artificial Sequence: Synthetic oligonucleotide
tccctgtggcaagagaagtt

SEQ ID NO: 109 - DNA, 20 bp, Artificial Sequence
  Description of Artificial Sequence: Synthetic oligonucleotide
tggtggtcaaaatggacaga

SEQ ID NO: 110 - DNA, 20 bp, Artificial Sequence
  Description of Artificial Sequence: Synthetic oligonucleotide
tcatccaagaagccctaacg

SEQ ID NO: 111 - DNA, 20 bp, Artificial Sequence
  Description of Artificial Sequence: Synthetic oligonucleotide
cgctttctctgagcattctg

SEQ ID NO: 112 - DNA, 20 bp, Artificial Sequence
  Description of Artificial Sequence: Synthetic oligonucleotide
gatggcagattccgactgag

SEQ ID NO: 113 - DNA, 20 bp, Artificial Sequence
  Description of Artificial Sequence: Synthetic oligonucleotide
cttgcacatgtgaggccata

SEQ ID NO: 114 - DNA, 20 bp, Artificial Sequence
  Description of Artificial Sequence: Synthetic oligonucleotide
ccagcaagcaacccatagtc

SEQ ID NO: 115 - DNA, 19 bp, Artificial Sequence
  Description of Artificial Sequence: Synthetic oligonucleotide
acttgctgccgggtatagg

SEQ ID NO: 116 - DNA, 20 bp, Artificial Sequence
  Description of Artificial Sequence: Synthetic oligonucleotide
ggaactcctctgaagcaagc

SEQ ID NO: 117 - DNA, 20 bp, Artificial Sequence
  Description of Artificial Sequence: Synthetic oligonucleotide
cacgggcttctcttcactct

SEQ ID NO: 118 - DNA, 20 bp, Artificial Sequence
  Description of Artificial Sequence: Synthetic oligonucleotide
cagccggtttattgtgcttc

SEQ ID NO: 119 - DNA, 20 bp, Artificial Sequence
  Description of Artificial Sequence: Synthetic oligonucleotide
aacaaagcctggacaaatgg

SEQ ID NO: 120 - DNA, 20 bp, Artificial Sequence
  Description of Artificial Sequence: Synthetic oligonucleotide
cgaggagaacagcaacgata

SEQ ID NO: 121 - DNA, 20 bp, Artificial Sequence
  Description of Artificial Sequence: Synthetic oligonucleotide
cagatcttgccatccaccag

SEQ ID NO: 122 - DNA, 20 bp, Artificial Sequence
  Description of Artificial Sequence: Synthetic oligonucleotide
gtccctggatgtcaaccact

SEQ ID NO: 123 - DNA, 20 bp, Artificial Sequence
  Description of Artificial Sequence: Synthetic oligonucleotide
gatgtagccatgctcgtcct

SEQ ID NO: 124 - DNA, 20 bp, Artificial Sequence
  Description of Artificial Sequence: Synthetic oligonucleotide
tatgatggctcgaaggctct

SEQ ID NO: 125 - DNA, 20 bp, Artificial Sequence
  Description of Artificial Sequence: Synthetic oligonucleotide
cctgtgccttggctaaactc

SEQ ID NO: 126 - DNA, 18 bp, Artificial Sequence
  Description of Artificial Sequence: Synthetic oligonucleotide
ccagtgggtcctcacagc

SEQ ID NO: 127 - DNA, 20 bp, Artificial Sequence
  Description of Artificial Sequence: Synthetic oligonucleotide
agctgtggctgacctgaaat

SEQ ID NO: 128 - DNA, 22 bp, Artificial Sequence
  Description of Artificial Sequence: Synthetic oligonucleotide
agcattgaaccagaggagttct

SEQ ID NO: 129 - DNA, 18 bp, Artificial Sequence
  Description of Artificial Sequence: Synthetic oligonucleotide
cccgagcaggtgcttttg

SEQ ID NO: 130 - DNA, 20 bp, Artificial Sequence
  Description of Artificial Sequence: Synthetic oligonucleotide
gtggacacctgtgtcagcat

SEQ ID NO: 131 - DNA, 19 bp, Artificial Sequence
  Description of Artificial Sequence: Synthetic oligonucleotide
cctcccacaatccgagact

SEQ ID NO: 132 - DNA, 19 bp, Artificial Sequence
  Description of Artificial Sequence: Synthetic oligonucleotide
ctgattgttgacgggaacg

SEQ ID NO: 133 - DNA, 20 bp, Artificial Sequence
  Description of Artificial Sequence: Synthetic oligonucleotide
aggcatttttgcttcacacc

SEQ ID NO: 134 - DNA, 18 bp, Artificial Sequence
  Description of Artificial Sequence: Synthetic oligonucleotide
cccctgctgtgccaaaac

SEQ ID NO: 135 - DNA, 18 bp, Artificial Sequence
  Description of Artificial Sequence: Synthetic oligonucleotide
gcagtgccctggaggaga

SEQ ID NO: 136 - DNA, 20 bp, Artificial Sequence
  Description of Artificial Sequence: Synthetic oligonucleotide
tgagcgagtaccccacctac

SEQ ID NO: 137 - DNA, 20 bp, Artificial Sequence
  Description of Artificial Sequence: Synthetic oligonucleotide
cccctacaagttggcagaag

SEQ ID NO: 138 - DNA, 25 bp, Artificial Sequence
  Description of Artificial Sequence: Synthetic oligonucleotide
ttgcaggaagaataggatcttctaa

SEQ ID NO: 139 - DNA, 18 bp, Artificial Sequence
  Description of Artificial Sequence: Synthetic oligonucleotide
agtcccatccccattcct

SEQ ID NO: 140 - DNA, 20 bp, Artificial Sequence
  Description of Artificial Sequence: Synthetic oligonucleotide
tatctgcatctggctgctgt

SEQ ID NO: 141 - DNA, 20 bp, Artificial Sequence
  Description of Artificial Sequence: Synthetic oligonucleotide
tgcaaggagcactcaatgac

SEQ ID NO: 142 - DNA, 20 bp, Artificial Sequence
  Description of Artificial Sequence: Synthetic oligonucleotide
aagcgattgacccttgagac

SEQ ID NO: 143 - DNA, 20 bp, Artificial Sequence
  Description of Artificial Sequence: Synthetic oligonucleotide
tgttgcgagttgtttctgct

SEQ ID NO: 144 - DNA, 20 bp, Artificial Sequence
  Description of Artificial Sequence: Synthetic oligonucleotide
gcactgagtcatcaggagca

SEQ ID NO: 145 - DNA, 20 bp, Artificial Sequence
  Description of Artificial Sequence: Synthetic oligonucleotide
caccagttccggacacacta

SEQ ID NO: 146 - DNA, 20 bp, Artificial Sequence
  Description of Artificial Sequence: Synthetic oligonucleotide
agtcctggtgggaacagatg

SEQ ID NO: 147 - DNA, 20 bp, Artificial Sequence
  Description of Artificial Sequence: Synthetic oligonucleotide
ttggagccacagagaaggtt

SEQ ID NO: 148 - DNA, 19 bp, Artificial Sequence
  Description of Artificial Sequence: Synthetic oligonucleotide
tgttctgctgggagtgcat

SEQ ID NO: 149 - DNA, 20 bp, Artificial Sequence
  Description of Artificial Sequence: Synthetic oligonucleotide
tgccgaaggtagatgagctt

SEQ ID NO: 150 - DNA, 20 bp, Artificial Sequence
  Description of Artificial Sequence: Synthetic oligonucleotide
tatggtattcacgccctgct

SEQ ID NO: 151 - DNA, 20 bp, Artificial Sequence
  Description of Artificial Sequence: Synthetic oligonucleotide
tgacacacatgacgatgcag

SEQ ID NO: 152 - DNA, 20 bp, Artificial Sequence
  Description of Artificial Sequence: Synthetic oligonucleotide
cgatgattccatttgtgtgc

SEQ ID NO: 153 - DNA, 20 bp, Artificial Sequence
  Description of Artificial Sequence: Synthetic oligonucleotide
tgagccaccactgttctttg

SEQ ID NO: 154 - DNA, 20 bp, Artificial Sequence
  Description of Artificial Sequence: Synthetic oligonucleotide
ctggttctctgcctgcagtt

SEQ ID NO: 155 - DNA, 20 bp, Artificial Sequence
  Description of Artificial Sequence: Synthetic oligonucleotide
gcagtgacttcgtcatttgg

SEQ ID NO: 156 - DNA, 20 bp, Artificial Sequence
  Description of Artificial Sequence: Synthetic oligonucleotide
ctggcttatgggcaacattt

SEQ ID NO: 157 - DNA, 20 bp, Artificial Sequence
  Description of Artificial Sequence: Synthetic oligonucleotide
ccccaagaccatgagaaaaa

SEQ ID NO: 158 - DNA, 19 bp, Artificial Sequence
  Description of Artificial Sequence: Synthetic oligonucleotide
ctgcctgcaggtggagaac

SEQ ID NO: 159 - DNA, 20 bp, Artificial Sequence
  Description of Artificial Sequence: Synthetic oligonucleotide
gagtcatccacgcagttcaa

SEQ ID NO: 160 - DNA, 23 bp, Artificial Sequence
  Description of Artificial Sequence: Synthetic oligonucleotide
tcatgtttctggaaagagcattt

SEQ ID NO: 161 - DNA, 23 bp, Artificial Sequence
  Description of Artificial Sequence: Synthetic oligonucleotide
tgctttcaatatcaaacagagca

SEQ ID NO: 162 - DNA, 20 bp, Artificial Sequence
  Description of Artificial Sequence: Synthetic oligonucleotide
gccgatgtaattggcttctc

SEQ ID NO: 163 - DNA, 20 bp, Artificial Sequence
  Description of Artificial Sequence: Synthetic oligonucleotide
tggttttctgctccttggtc

SEQ ID NO: 164 - DNA, 22 bp, Artificial Sequence
  Description of Artificial Sequence: Synthetic oligonucleotide
gcatcactaaggtcttcagcaa

SEQ ID NO: 165 - DNA, 20 bp, Artificial Sequence
  Description of Artificial Sequence: Synthetic oligonucleotide
tcagtccctttctcgtcgat

SEQ ID NO: 166 - DNA, 22 bp, Artificial Sequence
  Description of Artificial Sequence: Synthetic oligonucleotide
tcatcttcttctgtgcctttca

SEQ ID NO: 167 - DNA, 22 bp, Artificial Sequence
  Description of Artificial Sequence: Synthetic oligonucleotide
tccttgatgtatcttcggacaa

SEQ ID NO: 168 - DNA, 20 bp, Artificial Sequence
  Description of Artificial Sequence: Synthetic oligonucleotide
ggagtttgctcagcttctgg

SEQ ID NO: 169 - DNA, 20 bp, Artificial Sequence
  Description of Artificial Sequence: Synthetic oligonucleotide
tgatattctgctccccaacc

SEQ ID NO: 170 - DNA, 20 bp, Artificial Sequence
  Description of Artificial Sequence: Synthetic oligonucleotide
ccagcagggacaatgagatt

SEQ ID NO: 171 - DNA, 18 bp, Artificial Sequence
  Description of Artificial Sequence: Synthetic oligonucleotide
agtggcctccgcacagtc

SEQ ID NO: 172 - DNA, 20 bp, Artificial Sequence
  Description of Artificial Sequence: Synthetic oligonucleotide
gccgaggtgatagtgtggtt

SEQ ID NO: 173 - DNA, 20 bp, Artificial Sequence
  Description of Artificial Sequence: Synthetic oligonucleotide
tgaggtgatgtcctcgtctg

SEQ ID NO: 174 - DNA, 21 bp, Artificial Sequence
  Description of Artificial Sequence: Synthetic oligonucleotide
ggagtttgctggactttctca

SEQ ID NO: 175 - DNA, 20 bp, Artificial Sequence
  Description of Artificial Sequence: Synthetic oligonucleotide
acgtagttcatccgctccac

SEQ ID NO: 176 - DNA, 20 bp, Artificial Sequence
  Description of Artificial Sequence: Synthetic oligonucleotide
cagagtgcaaccaatcacct

SEQ ID NO: 177 - DNA, 22 bp, Artificial Sequence
  Description of Artificial Sequence: Synthetic oligonucleotide
aattgagaagagcttccattca

SEQ ID NO: 178 - DNA, 20 bp, Artificial Sequence
  Description of Artificial Sequence: Synthetic oligonucleotide
ggagacgtaaagctgccaac

SEQ ID NO: 179 - DNA, 20 bp, Artificial Sequence
  Description of Artificial Sequence: Synthetic oligonucleotide
agctactgctttggcaggaa

SEQ ID NO: 180 - DNA, 20 bp, Artificial Sequence
  Description of Artificial Sequence: Synthetic oligonucleotide
acaaggctttttgcatttgg

SEQ ID NO: 181 - DNA, 22 bp, Artificial Sequence
  Description of Artificial Sequence: Synthetic oligonucleotide
tggtgtctggttaccaaaagag

SEQ ID NO: 182 - DNA, 20 bp, Artificial Sequence
  Description of Artificial Sequence: Synthetic oligonucleotide
tggaggaggccagactacag

SEQ ID NO: 183 - DNA, 20 bp, Artificial Sequence
  Description of Artificial Sequence: Synthetic oligonucleotide
ctccagaccctggtacttgc

SEQ ID NO: 184 - DNA, 18 bp, Artificial Sequence
  Description of Artificial Sequence: Synthetic oligonucleotide
gccgactacctgctgctg

SEQ ID NO: 185 - DNA, 25 bp, Artificial Sequence
  Description of Artificial Sequence: Synthetic oligonucleotide
gattttgtcctggtagtgtttaatg

SEQ ID NO: 186 - DNA, 20 bp, Artificial Sequence
  Description of Artificial Sequence: Synthetic oligonucleotide
gcattggcctgttcttcagt

SEQ ID NO: 187 - DNA, 22 bp, Artificial Sequence
  Description of Artificial Sequence: Synthetic oligonucleotide
tcatcaaaggaatgcactagga

SEQ ID NO: 188 - DNA, 23 bp, Artificial Sequence
  Description of Artificial Sequence: Synthetic oligonucleotide
tcaagtagagatttgctcaatgc

SEQ ID NO: 189 - DNA, 19 bp, Artificial Sequence
  Description of Artificial Sequence: Synthetic oligonucleotide
ggcttcattggttggtcat

SEQ ID NO: 190 - DNA, 20 bp, Artificial Sequence
  Description of Artificial Sequence: Synthetic oligonucleotide
tgccacttgacggaattgta

SEQ ID NO: 191 - DNA, 20 bp, Artificial Sequence
  Description of Artificial Sequence: Synthetic oligonucleotide
ccaggtagcatgaggggata

SEQ ID NO: 192 - DNA, 20 bp, Artificial Sequence
  Description of Artificial Sequence: Synthetic oligonucleotide
ggtggaaggaatggaggatt

SEQ ID NO: 193 - DNA, 20 bp, Artificial Sequence
  Description of Artificial Sequence: Synthetic oligonucleotide
aaccttccctgcaatacgtg

SEQ ID NO: 194 - DNA, 20 bp, Artificial Sequence
  Description of Artificial Sequence: Synthetic oligonucleotide
agcagctgaacgagcagttt

SEQ ID NO: 195 - DNA, 20 bp, Artificial Sequence
  Description of Artificial Sequence: Synthetic oligonucleotide
aaggaacgtccgagtcagaa

SEQ ID NO: 196 - DNA, 20 bp, Artificial Sequence
  Description of Artificial Sequence: Synthetic oligonucleotide
ctttcgatgtgccaagtgtg

SEQ ID NO: 197 - DNA, 20 bp, Artificial Sequence
  Description of Artificial Sequence: Synthetic oligonucleotide
ggcccgaagtttttagcata

SEQ ID NO: 198 - DNA, 20 bp, Artificial Sequence
  Description of Artificial Sequence: Synthetic oligonucleotide
atttgcccagaagattggtg

SEQ ID NO: 199 - DNA, 20 bp, Artificial Sequence
  Description of Artificial Sequence: Synthetic oligonucleotide
catcgaaagcaggccttatg

SEQ ID NO: 200 - DNA, 20 bp, Artificial Sequence
  Description of Artificial Sequence: Synthetic oligonucleotide
cagagacgtcacaagccaac

SEQ ID NO: 201 - DNA, 22 bp, Artificial Sequence
  Description of Artificial Sequence: Synthetic oligonucleotide
tgctgactgtgttgtaattgga

SEQ ID NO: 202 - DNA, 20 bp, Artificial Sequence
  Description of Artificial Sequence: Synthetic oligonucleotide
gcctactgcctgaactgctt

SEQ ID NO: 203 - DNA, 20 bp, Artificial Sequence
  Description of Artificial Sequence: Synthetic oligonucleotide
ccgttcctcaaaggagatgt

SEQ ID NO: 204 - DNA, 20 bp, Artificial Sequence
  Description of Artificial Sequence: Synthetic oligonucleotide
ccctggaggagtgctatgtc

SEQ ID NO: 205 - DNA, 18 bp, Artificial Sequence
  Description of Artificial Sequence: Synthetic oligonucleotide
gtgccgttgaacttgacg

SEQ ID NO: 206 - DNA, 21 bp, Artificial Sequence
  Description of Artificial Sequence: Synthetic oligonucleotide
ccaagacgtagatccatccaa

SEQ ID NO: 207 - DNA, 20 bp, Artificial Sequence
  Description of Artificial Sequence: Synthetic oligonucleotide
tctgaggttggtcctgaggt

SEQ ID NO: 208 - DNA, 20 bp, Artificial Sequence
  Description of Artificial Sequence: Synthetic oligonucleotide
gtgatctttgccaccttcgt

SEQ ID NO: 209 - DNA, 20 bp, Artificial Sequence
  Description of Artificial Sequence: Synthetic oligonucleotide
cagtctgccactccgagttt

SEQ ID NO: 210 - DNA, 21 bp, Artificial Sequence
  Description of Artificial Sequence: Synthetic oligonucleotide
tgctgctagatttgactgcaa

SEQ ID NO: 211 - DNA, 20 bp, Artificial Sequence
  Description of Artificial Sequence: Synthetic oligonucleotide
tcccgtcctcatcgtagtct

SEQ ID NO: 212 - DNA, 21 bp, Artificial Sequence
  Description of Artificial Sequence: Synthetic oligonucleotide
agtgtgaggcagtggaaaact

SEQ ID NO: 213 - DNA, 20 bp, Artificial Sequence
  Description of Artificial Sequence: Synthetic oligonucleotide
ccagggtaccagaccaagtg

SEQ ID NO: 214 - DNA, 24 bp, Artificial Sequence
  Description of Artificial Sequence: Synthetic oligonucleotide
gacattccattctatcacaacctg

SEQ ID NO: 215 - DNA, 18 bp, Artificial Sequence
  Description of Artificial Sequence: Synthetic oligonucleotide
gcgggtcatttcactgag

SEQ ID NO: 216 - DNA, 20 bp, Artificial Sequence
  Description of Artificial Sequence: Synthetic oligonucleotide
tctgaggccatcattgaaca

SEQ ID NO: 217 - DNA, 20 bp, Artificial Sequence
  Description of Artificial Sequence: Synthetic oligonucleotide
tcaggggcttcttcttcttg

SEQ ID NO: 218 - DNA, 20 bp, Artificial Sequence
  Description of Artificial Sequence: Synthetic oligonucleotide
cgttgaaaacatgccgtcag

SEQ ID NO: 219 - DNA, 20 bp, Artificial Sequence
  Description of Artificial Sequence: Synthetic oligonucleotide
cttgccaaaggtgctttctg

SEQ ID NO: 220 - DNA, 20 bp, Artificial Sequence
  Description of Artificial Sequence: Synthetic oligonucleotide
tatcctttgccgtctcatca

SEQ ID NO: 221 - DNA, 20 bp, Artificial Sequence
  Description of Artificial Sequence: Synthetic oligonucleotide
ggctttcactcctcctgagc

SEQ ID NO: 222 - DNA, 20 bp, Artificial Sequence
  Description of Artificial Sequence: Synthetic oligonucleotide
agagtttgccgagaggtctg

SEQ ID NO: 223 - DNA, 20 bp, Artificial Sequence
  Description of Artificial Sequence: Synthetic oligonucleotide
tggtccaaggtctggtgaat

SEQ ID NO: 224 - DNA, 20 bp, Artificial Sequence
  Description of Artificial Sequence: Synthetic oligonucleotide
ttacagtccctgcccgatac

SEQ ID NO: 225 - DNA, 20 bp, Artificial Sequence
  Description of Artificial Sequence: Synthetic oligonucleotide
atgctgggtctttggaacac

SEQ ID NO: 226 - DNA, 20 bp, Artificial Sequence
  Description of Artificial Sequence: Synthetic oligonucleotide
cagctgacagaaagcctgaa

SEQ ID NO: 227 - DNA, 20 bp, Artificial Sequence
  Description of Artificial Sequence: Synthetic oligonucleotide
tccggttctgcttttcactt

SEQ ID NO: 228 - DNA, 20 bp, Artificial Sequence
  Description of Artificial Sequence: Synthetic oligonucleotide
gcggaggaggagaaagagat

SEQ ID NO: 229 - DNA, 20 bp, Artificial Sequence
  Description of Artificial Sequence: Synthetic oligonucleotide
actagggtcctcgtgtggtg

SEQ ID NO: 230 - DNA, 20 bp, Artificial Sequence
  Description of Artificial Sequence: Synthetic oligonucleotide
gttgagcagcatctcattgg

SEQ ID NO: 231 - DNA, 22 bp, Artificial Sequence
  Description of Artificial Sequence: Synthetic oligonucleotide
tgtggtccgaggcagtgagagt

SEQ ID NO: 232 - DNA, 21 bp, Artificial Sequence
  Description of Artificial Sequence: Synthetic oligonucleotide
acagagcaggcctcgaggtgt

SEQ ID NO: 233 - DNA, 18 bp, Artificial Sequence
  Description of Artificial Sequence: Synthetic oligonucleotide
acgacgctcttccgatct

SEQ ID NO: 234 - DNA, 18 bp, Artificial Sequence
  Description of Artificial Sequence: Synthetic oligonucleotide
cgtgtgctcttccgatct

SEQ ID NO: 235 - DNA, 1587 bp, Homo sapiens
cggattgtcagactgctcctccctcttctttagactgccacgaggaaaaagcagatgtgagaactcaaggttcagggctgctcttctaagaaacaagtctgccataatctccatctgtgttggaatctgttaactaatgaactggtctctgtgcaaatcctgagtgctaaagcttccaacaagactgatgctagctcgtgtcaccaggaagatgctacgtcatgccaagtgttttcagcgcctagcaatttttggttctgtgagggcactgcataaagataatagaacagcaacccctcagaatttctccaactatgaatccatgaaacaggacttcaaactggggattccagagtatttcaactttgctaaagatgtcctggaccaatggactgataaggaaaaggctggaaagaaaccttcaaatccagccttctggtggatcaacagaaatggagaagagatgcgatggagttttgaggaactgggatctctgtccagaaaatttgccaatatactttcagaagcctgttccctacaaagaggagatcgggtaattctgattctgcccagggtcccagagtggtggcttgcaaatgtggcctgtctgcgaacagggacagttttaattccaggaaccactcagctgacccagaaagacattctctacagactacaatcttcaaaagcaaactgcattatcaccaatgatgttttagccccagcagtagacgctgttgcatccaaatgtgaaaatctgcactccaagctgattgtatcagagaactccagagaggggtgggggaacctcaaggagttgatgaaacatgccagtgacagccacacctgtgtgaagacaaaacacaatgagatcatggccatattctttaccagtggaacaagtggatatccgaaaatgactgcacacacccacagcagttttggtttaggattatctgtaaatggaaggttctggctagatttgacaccctcagatgtgatgtggaatacctcagatacgggctgggcaaagtctgcatggagtagtgttttttctccgtggatccagggagcatgtgtattcacacaccatttaccccgttttgagccgacttctatcttgcaaacactctccaagtaccccatcacagtcttctgttcagcaccaactgtataccgaatgcttgtacagaatgatataaccagctataagtttaaaagcttaaagcactgtgtgagtgctggggaaccaattacccctgacgtgactgaaaaatggagaaacaagacgggcctggatatctacgaaggatatggacagactgaaacggtgctaatctgtggaaattttaagggaatgaaaattaaacctggctcaatgggaaaaccttctcctgctttcgatgttaaggtttgcacatccccttccaggagaatgtttaacaacccaatctgtacactacctacctaccgcttacccccatataaactttctttgttatgatggtgattccattttacttccatgatactttaatttttataaatatgtgaaaatgattagaaatgaaaaaaaaaaaaaaaaaa

SEQ ID NO: 236 - DNA, 11373 bp, Homo sapiens
gtgcgcggggcggcgccgcggaacatgacggcgccctgggtggccctcgccctcctctggggatcgctgtgcgccggctctgggcgtggggaggctgagacacgggagtgcatctactacaacgccaactgggagctggagcgcaccaaccagagcggcctggagcgctgcgaaggcgagcaggacaagcggctgcactgctacgcctcctggcgcaacagctctggcaccatcgagctcgtgaagaagggctgctggctagatgacttcaactgctacgataggcaggagtgtgtggccactgaggagaacccccaggtgtacttctgctgctgtgaaggcaacttctgcaacgaacgcttcactcatttgccagaggctgggggcccggaagtcacgtacgagccacccccgacagcccccaccctgctcacggtgctggcctactcactgctgcccatcgggggcctttccctcatcgtcctgctggccttttggatgtaccggcatcgcaagcccccctacggtcatgtggacatccatgaggaccctgggcctccaccaccatcccctctggtgggcctgaagccactgcagctgctggagatcaaggctcgggggcgctttggctgtgtctggaaggcccagctcatgaatgactttgtagctgtcaagatcttcccactccaggacaagcagtcgtggcagagtgaacgggagatcttcagcacacctggcatgaagcacgagaacctgctacagttcattgctgccgagaagcgaggctccaacctcgaagtagagctgtggctcatcacggccttccatgacaagggctccctcacggattacctcaaggggaacatcatcacatggaacgaactgtgtcatgtagcagagacgatgtcacgaggcctctcatacctgcatgaggatgtgccctggtgccgtggcgagggccacaagccgtctattgcccacagggactttaaaagtaagaatgtattgctgaagagcgacctcacagccgtgctggctgactttggcttggctgttcgatttgagccagggaaacctccaggggacacccacggacaggtaggcacgagacggtacatggctcctgaggtgctcgagggagccatcaacttccagagagatgccttcctgcgcattgacatgtatgccatggggttggtgctgtgggagcttgtgtctcgctgcaaggctgcagacggacccgtggatgagtacatgctgccctttgaggaagagattggccagcacccttcgttggaggagctgcaggaggtggtggtgcacaagaagatgaggcccaccattaaagatcactggttgaaacacccgggcctggcccagctttgtgtgaccatcgaggagtgctgggaccatgatgcagaggctcgcttgtccgcgggctgtgtggaggagcgggtgtccctgattcggaggtcggtcaacggcactacctcggactgtctcgtttccctggtgacctctgtcaccaatgtggacctgccccctaaagagtcaagcatctaagcccaggacatgagtgtctgtccagactcagtggatctgaagaaaaaaggaaaaaaagttgtgttttgttttggaaatcccataaaaccaacaaacacataaaatgcagctgctattttaccttgactttttattattattattataattattataattattattattaatattattttttggattggatcagtttttaccagcatattgctctactgtatcacaaacagcggacacgtcagcaggcgttgaggtgctgagctgtggatgcagaaccagcgccatgctgaagagcctcagccacctcctgtcctttgggattcgtttttcccgctttctctttgtttgtcgtctcagaatctgtgacacaaagaaacccatctcctgtcttaggaaacctaatgctgcaaactctacctagaggaacctttgaagactgttacataagaacataccttcctcagaagaggagtttcctctgccctctgcccttctcccctgcctccctccctcccctccttttattttgttttagtgagcttaagaaacagcagatgtgtctttcacggatctaacgggtgttgtcctgatcgagaaaaaaactgggatgagaatggtttggactggagttggaaggggaggacggtactgggggtagggtttggaacagagctacactggactcgggcacattcggagcagcatcctttagtatggaggctacttctcaggtaaccaggaattgaggggaaggaccttgtggaggccgagcattaacagcaagagcggggtttggagaaagtctgagattgggtgcagccctgacttacctgctggccctgaccagtttcttttcactaacttggccttgggcataggatgaaacattttttctgccctaattttaaaactaggtgagggtagaatcatcacaggttaggaatacattcttcataagacacgatgctgtaaatacccttaatggacgaaaagttgaaatacttttgtttcctcttggagcagttcagggaaatgcccacaggggattgtcctgcacagatagggcaagaggatttcctgggtggagtctgccaaggcctgcctcgctggggaccccagagtcctgcacctctggttccgccccaggtggtgacattactgtccccgttctgtggctcgtggacaagactttctccagaccccttaaagtggtacatattctaaaaaactgtttttctattatgccataaccttgctctagtcagtgaatgttcctaatgctgctgtttcaacatttgaattctttttaatttatgaaacatgctaaattttttttttcaaacaaaacacacacatccacatatacacatgcttcgctatgtggcttccaaggtttaaattttgaaaagtaaaagaattaaaacttcacgaccacagatcacctcaaaccagaaatacctcagaattttctacttatgtaaggtttattatatattttgttagttgtgttgtcttgtagtaagtatattttaatgtaagttggcttttgtgacaaggaagtttaaaagaaatagagaaaaagaaaaaagtttgcatcttctagggagtgctaccatttttgtttgataacgcccccttgtaaataattgtcatcaactgtaggttggctgtctgggccaagtctgggcatttatcagtcttgtttgtgaaggcttttccttctggtttctttagatcattttatttaaaaacagtgcatctcttcatcgtgagggtaggcaaggcgggggccgtggggagaggttgacctgggtgagaactgaagaggccgcctcctcttgggttgtttggagcttcacatgtaattcacatgtaacatgtaacttgatcggtcagtgttcagaatgacaagtaaccccgcttaaacttggtagaaggatggcccttagacctgaatggggtgattttacttgggatttaacttcttcagcaaattaacagcaacgttggaagagatctgtggcgcctctgtgaagcacaccgtgactcaggccagtcttttagtgcagcgtgtctgggagtgaagggttttgcccttgctggtcttggagtccacagtgtgaggggcactgcacatgcctgggcatctacctagtgtgctatgttcagtgtctggggcttactgccccggggtcctttcctctgggtgttggggcacagggtgctatgggaggcccatttgcttccctctcggagctcagtttttgcttcatgggtcaaaatgtgggctggccaagtggttacaggaacagggtttcggtaagctatgttgtctttttttttttttttttttttttttttaatggtttgattttgtgctgtggtattttttttcccttagaataatttttaatggcaaaacaggccttacagcagttgcttttctttaccatttatttctttaagaagctttaaaatatttattgaaaagtgccatatctaatttctttagctttcgcctcaggcagtgcaggcatctttacttttcatcctcagaagaaacaaacgactaacaaatgtagcaaatttactgcaggaatagttaggtcatgatactacctgaacactaaaccccagcctctttgtttggttttagttcctctgggtggtttttcttttgtgtgctggcttgattcttgtgagaagttttgacctggccaagggagggttgagccatggttctggtgtgggactttgcggtcaagacacagtacagacaggtcaggcctgcgtgccttttctctgggtggcctccccgttaggcccaccgtacgctcagccactatagtgtccctgtggggccttgccatcagattgtgtgtcaggagatggtacctttttggtgtggctggggaggagtgtggtccatgccagttctttgggcttcaggccactcttcccctcatgctgtggtgtaaagtgcacccatcaggtggtatatctggttctgatggcaagaagaaggtgggggatctccttatagggcatgggtctaggagcacagatgggccttttgccccgggtaaatgcttgtctgtttgctgtcatgtgttctttgaggagtgagccatctcgagccctgctttgaatttactgggtcatagagcctctgcctgtgctcttttccataatgacttcatgtgacatgcacttttggtgggctcagataattggtttctttttgtttttgacctcaggctctgtggcagactggggaaaatggggcctggcatcattttccctgtcaatgggaggggctgttccatgcagggtgggaggggaccaagttagcagagagtagccaaggatccttgcttcttcctttctagtgtgctgtcatccaagcaggctcctggctgtagggatgggccttggggaagaatcttctttgaaagcatctatgataactgagaagtcatccctagttggagaaatccagtaatgagcagaaggaggaagcaagtgaggacagaggccattgtattacagtgtcacgcagagggccctcaatgatggggcattggggaaggctgtagacatagtcatcagaacatcctggcctggcataagctgggttttctcctgggaccattggtcctcagcaggagttctttgcatgagttgctcaggggcaagggctgcaagtgggctgtgcttaggagaaagtgacacctggcagtgagggaagatggtgagcattattagcctttgttgtccagcatggccttcttgtcctgtctgctctggagaggagcctgtgggaccagtcctgcctggggagggcatacccacacgtgccagctgattctgactctgaatacatcatgtccggacttgggggtgtttctgcagaaaaaggaggttgtttttcagccttgaacatcttcaggaggatagagactcttgctcacatattcttagcaaagggaagggtctctcatctccaggccacagagatagttcttccattgccctaagaggctaggctaaccctcttgacataacttagacagcaaagcacttcatcctgtagttgggctctgtcacctttctcttcagttggccacattctcgtttcctccatcctgctatgctttgtgtgctcgggctgtgtgtggggtttttccctggtggaaggaagcccagctgtgtattgaatgtccttcatgtgttgtgtgtggctcagaaagcctgtcacttggcccctgtgctctgagccgtgagggtggggaggtggctgttccattaaagtgggagtattggatggccctcttgaaactagaattttgccttttttagtatgcagtataaagtttccagcatctattggtaacacaaagatttgctggtttttaaaataatacagtaagcataagtatgtaagtttttagaattggtactagaagttggacagctagttattctcgagaactttatttcactagaaaaatatactaattggaaagcagtttccaggagttaactcagtttaattttcagtctcagttattttagcctgttgagtttttgatggcacacctttggagagatggccacgcctgattcccatttcaggggcatcagaccatacctttttaagaagctccgtgaatctagtcatctacccttcatcctgggcgaacagccaaaaagagaaggggacaaggtgtctttttctccttctcactggggtgacatgaattcttttagttaatggctgtttgcaaattctaaactaatgaaatacttagcagctaacatgttcaatctagtaatgatgagtttaaatctcaattgacagtaatgttttagataaacaggcccagtaattcagttgatgaactgtatatcttctcagtctagatttgtaaatgtttaatgaattcagggttataagcatagttctttaagtaagattccagatagttgatttgcaaccagcagtctacctatgaatgtatcccaaacctttagaagattggaaaagatttttgaaataatgatttagttttgtaggaaaaacacccccttgaaaattaattcggttgacccagtaacattttttaaaacaattggtggctccaaaaggcctgccaacaaagaaaagtccaaattatctagtgggacattttgaatgttttatgtttattttgggtccactgtaaactttggttcaaaaaagaatttgaatttaaagaatttaccattatttaaattattaccaagtttttacattttcatgatggtattttccaggtatgaatgaaacatgactttttgattgtggtacttcctgtatcccctgtagtgccaaaaccagtgatactttatttgctcctatggcagctcatagaggtaaccgaagtgatttttcctcagtaattgaaacacatattctctaaatgccaatgtgtggtgatgggccctgcactgccttcatttctctagggcagtgtctttggattgtctagggcctaggtaattctgagaactactgtaaaccaaccacagggcactaaagcaatgtacacaccactctttgtgtgtatggaaggggttatataaacctgggctatgctggacatctacagaagagtattacattcacttgcaaagtttacatttttgagctcacagttatgaaaaatatgacccacaagtttttcaggcaggtgaggatgggtcttcttgcaaatgcatgagttctgtcttgagtcctgggaacttctctgttggttgagtgtgggctcattccctgactctcctaatcatgtttgcgtcagaatgttagcattgtaaataaaagaataggttgtataatagatacacaacacttgaaactttactttaaaaaaatcgatagttctacatatatatttagttatatcacttgacagatttcttctacacagtgtggagattgttttataccacagattatttttataaagttagtgaatttgaatgattttgtaatcagagctaatgagctttacctttcaagagaaacgtacactggagcatgagtggtgtggaacttttacttagtgtttatatggattcttgtgatacactggcagactggagtcaatttgcgggtcttttttggccaaaactccacttgtggttgtgtaggacagtgatattcagctcagcttcttgtggattgggaggagagagggcctgcaatgtgttttacattggtgcttcctcctgagatttctgttgaacaaagggttctgaggtcaaaaattagtttgtaagcctttgccataggacatagtcatgtgagagtgtttgggggaacagaaattgtataggggtgcctattggggtgggatgggactcgaataagattcaggtacaaaaactttgaaatgagaatctggtggtttgagtaatccaccagactgaattatctaagatcacattatccaggttggggggcagaattacccagttaagtaattgttcagaaaagtggggagggtggcatgtggatgcagtgatccaattaaatggagagctgccaggcacattttgtcctctctggtcagtgagaatggttgggttggctcgctgcttcaatctgtggaatcagccaggagcccagtgaggaagctcagaaccccagtaacagcagagcatctttcagatagctccagagttttcctgcttttctgaggaagctcagcatcactgccacaatacggaaagtggtcttcattttagcctatttatttttaggcagagagtggatggttatttgtgtgggacttttggtggcgatatataatgaataattaagttaatttctggtatgcataatggccagtcctgaggcccagctgaagacctgtcccccagaccctgcccgctggcttcaggctgctgcttctagacagaggtgcactggacgggatagttttatcaagagaatccctaatgtgtcattttaaaccagctgtgctttttattcattctggttgagcgtataggtttacactttaccctttttatacttggaataaatttagttccagcagatctagtagcactccagaaaccaaccccatctgttccccataaaaagaacattttctctgctctccagccacgtgtcttggaatgtaattctgttgtgcctttgtttttatcactctcttcgccccaaaagcaactgctgtaagcttttttctacttgtcttttctagtccccaacctctacctttttcctttttcccagccctaatttctggatgcacttctgtgatccaggtattttaagaaccagttacctcagacctcatgttgaacagtgtcgccatctgggtcctcttgatactgcagacttttaacgtacacatgcaggaaccctgctgagcgtgggcacttgttttaaagcaaaactcttcccaaggactgaagaaagggcttctggcaagctcgtcatggcattgtggtgggatgggtctagagtgtcatctgaatggtgcttcctgtgttcctctttgaattctgccattttcagtattcttgtgtgtctgaataggcaaagcgatttaattggctggtcttgcacgcaaattagttccaaagataagctctttgtaacacatttccagtcgctaatgctcaaatgtagaacattcctttaaatggcaggataaaaaacccactatccaccatagtgcattttgggaagatgtctgtagcatatgttgctgtgaaattaggccttgtgggatatggctgtttgtcattttgatgtattttaaataaatatatatattttttaaagagccttttttaccagttcaaaaagtttaattaaccagcagtcaccgcatctgaatttttgtctctggggcatagatggcagaccaagattaaaagtggtaactcagctatacgagcatgggctaccttcctgggctctcctgcagtcctgtagacctgctgttccgcagaccatgggacacaaggtcagtgtgttcccagtgagggtcccaagtcagtcatcttaagtgtttgttctctgccccattcagtggactgttgacttcagtccctgcaagtgctttagcccgagtggggttttctcagagcactgccacgagttaagtgtgtgtttagccaaataatttctccgtaagggaaaaatgcagtcacccaaattttaccaacaatgacagagatgagagtagaaaagattaggcaacatctgagttttaacttgaaaagtgtccaagtcatcatgaaaggccgactgggagcaagtgattattagagattcttcaggagacctcatctgaaaatgttaagactgccagtgagggaaggaattgttaaaatgccagcggcttttttttcctctttttttctgtaattctgtaaaaatgcagagaaagttgagtggtacttcagaattgagggagagggttaccgcagagtagaaatatatttctagatttcagttccacaccacaaatccacaacaatgccatttttcaactgtacaaaaatctgcttatgaactggacatgatcttaatggtagtgtcaaaggccaagtttttcacctgttaatatttttccacatttgtccttgaatctgaataactttatacagtactgtaaatttaacttacatcgagtttgttgtcaattcttatgaaaagagctttctgcatgtaacacatacggttaaagaacacagcaaaggacaaaatttgcaggaacagttttggaaccaacagaaaatgtcaccttttatttgccatcttatatatatctatcagttttaccagctacttctaaatttgtacattatttgtaagggaaagaaggaaaaccctaagacttgtctaacttagtggagaatgtgtgtgttgggcttaggatggatagctaagtcttattgagctgtgttacctaacttgtatataaaaattgtaattaaaagtttgggttcacctgtttctcacagtttaaaatgatgagtaattgcaaactctggaaatgtgactagtatatgatttaaggctgtagaagcaaggaagctctttcaagtgctaaaactaaagacttctagtttttggctcaaataagtactgtttgtataccaggatatgtgagatgtaaatgtagtaggtcacttttcacccttgtagctataaaataaaaattttgtagaacagaaatagcttgtactactgaattaacaaaagttatactaaagtatcatgtttaaaaaaaatatatatatatatacagagttaagcttgttgctgttaccctgtctggatttgaaaagtgtgctgatttatatatatatattacacacacacacacacacacacacacacacacacacacacacacacacacacacacacacacacacacacacatacacctaaaatggcctaaagcagacatccatgtaattacagttgcaaaatgaaaacattttggaaagaacattgtatcatagttcattcatttgcagtggatctttgttcctttttactgtggtaattttagaaatgagtgtcaagtttgaaattagatctgctaagttggggttttgctgcttgaactctgcactgggtcctcaaataaaccgatgtgaatgtagttttttccccctgtgtgaagaagcagttacaccccaacaataggaggaaaaatctagaactatttcaagttttatctttttgtatatgaaaataaaataataataaaacaa

SEQ ID NO: 237 - DNA, 3352 bp, Homo sapiens
ggggcgtggcgccggggattgggagggcttcttgcaggctgctgggctggggctaagggctgctcagtttccttcagcggggcactgggaagcgccatggcactgcagggcatctcggtcgtggagctgtccggcctggccccgggcccgttctgtgctatggtcctggctgacttcggggcgcgtgtggtacgcgtggaccggcccggctcccgctacgacgtgagccgcttgggccggggcaagcgctcgctagtgctggacctgaagcagccgcggggagccgccgtgctgcggcgtctgtgcaagcggtcggatgtgctgctggagcccttccgccgcggtgtcatggagaaactccagctgggcccagagattctgcagcgggaaaatccaaggcttatttatgccaggctgagtggatttggccagtcaggaagcttctgccggttagctggccacgatatcaactatttggctttgtcaggtgttctctcaaaaattggcagaagtggtgagaatccgtatgccccgctgaatctcctggctgactttgctggtggtggccttatgtgtgcactgggcattataatggctctttttgaccgcacacgcactggcaagggtcaggtcattgatgcaaatatggtggaaggaacagcatatttaagttcttttctgtggaaaactcagaaattgagtctgtgggaagcacctcgaggacagaacatgttggatggtggagcacctttctatacgacttacaggacagcagatggggaattcatggctgttggagcaatagaaccccagttctacgagctgctgatcaaaggacttggactaaagtctgatgaacttcccaatcagatgagcatggatgattggccagaaatgaagaagaagtttgcagatgtatttgcagagaagacgaaggcagagtggtgtcaaatctttgacggcacagatgcctgtgtgactccggttctgacttttgaggaggttgttcatcatgatcacaacaaggaacggggctcgtttatcaccagtgaggagcaggacgtgagcccccgccctgcacctctgctgttaaacaccccagccatcccttctttcaaaagggatcctttcataggagaacacactgaggagatacttgaagaatttggattcagccgcgaagagatttatcagcttaactcagataaaatcattgaaagtaataaggtaaaagctagtctctaacttccaggcccacggctcaagtgaatttgaatactgcatttacagtgtagagtaacacataacattgtatgcatggaaacatggaggaacagtattacagtgtcctaccactctaatcaagaaaagaattacagactctgattctacagtgatgattgaattctaaaaatggttatcattagggcttttgatttataaaactttgggtacttatactaaattatggtagttattctgccttccagtttgcttgatatatttgttgatattaagattcttgacttatattttgaatgggttctagtgaaaaaggaatgatatattcttgaagacatcgatatacatttatttacactcttgattctacaatgtagaaaatgaggaaatgccacaaattgtatggtgataaaagtcacgtgaaacagagtgattggttgcatccaggccttttgtcttggtgttcatgatctccctctaagcacattccaaactttagcaacagttatcacactttgtaatttgcaaagaaaagtttcacctgtattgaatcagaatgccttcaactgaaaaaaacatatccaaaataatgaggaaatgtgttggctcactacgtagagtccagagggacagtcagttttagggttgcctgtatccagtaactcggggcctgtttccccgtgggtctctgggctgtcagctttcctttctccatgtgtttgatttctcctcaggctggtagcaagttctggatcttatacccaacacacagcaacatccagaaataaagatctcaggaccccccagcaagtcgttttgtgtctccttggactgagttaagttacaagcctttcttatacctgtctttgacaaagaagacgggattgtctttacataaaaccagcctgctcctggagcttccctggactcaacttcctaaaggcatgtgaggaaggggtagattccacaatctaatccgggtgccatcagagtagagggagtagagaatggatgttgggtaggccatcaataaggtccattctgcgcagtatctcaactgccgttcaacaatcgcaagaggaaggtggagcaggtttcttcatcttacagttgagaaaacagagactcagaagggcttcttagttcatgtttcccttagcgcctcagtgattttttcatggtggcttaggccaaaagaaatatctaaccattcaatttataaataattaggtccccaacgaattaaatattatgtcctaccaacttattagctgcttgaaaaatataatacacataaataaaaaaatatatttttcatttctatttcattgttaatcacaactacttactaaggagatgtatgcacctattggacactgtgcaacttctcacctggaatgagattggacactgctgccctcattttctgctccatgttggtgtccatatagtacttgattttttatcagatggcctggaaaacccagtctcacaaaaatatgaaattatcagaaggattatagtgcaatcttatgttgaaagaatgaactacctcactagtagttcacgtgatgtctgacagatgttgagtttcattgtgtttgtgtgttcaaatttttaaatattctgagatactcttgtgaggtcactctaatgccctgggtgccttggcacagttttagaaataccagttgaaaatatttgctcaggaatatgcaactaggaaggggcagaatcagaatttaagctttcatattctagccttcagtcttgttcttcaaccatttttaggaactttcccataaggttatgttttccagcccaggcatggaggatcacttgaggccaagagttcgagaccagcctggggaacttggctggacctccgtttctacgaaataaaaataaaaaaattatccaggtatggtggtgtgtgcctgtagtcctatctactcaagggtggggcaggaggatcacttgagcccaggaatttgaggccacagtgaattaggattgcaccactgcactctagcccaggcaacagaacaagaacctgtctctaaataaataaataaaaataataataataaaaaagatgttttccctacaa

SEQ ID NO: 238 - DNA, 2065 bp, Homo sapiens
gcatgttgacacatcaggcccagctctatcactggggagggagataggctgccagggacagaaagggctctttgagaaggccactctgcctggagtgggggcgccgggcactgtcccccaaggtcgcggcagaggagataggggtctgtcctgcacaaacaccccaccttccactcggctcacttaaggcaggcagcccagcccctggcagcacccacgatgcgggacctgcctctcaccagcctggccctagtgctgtctgccctgggggctctgctggggactgaggccctcagagcagaggagccagctgtgggcaccagtggcctcatcttccgagaagacttggactggcctccaggcagcccacaagagcctctgtgcctggtggcactgggcggggacagcaatggcagcagctcccccctgcgggtggtgggggctctaagcgcctatgagcaggccttcctgggggccgtgcagagggcccgctggggcccccgagacctggccaccttcggggtctgcaacaccggtgacaggcaggctgccttgccctctctacggcggctgggggcctggctgcgggaccctggggggcagcgcctggtggtcctacacctggaggaagtgacctgggagccaacaccctcgctgaggttccaggagcccccgcctggaggagctggccccccagagctggcgctgctggtgctgtaccctgggcctggccctgaggtcactgtgacgagggctgggctgccgggtgcccagagcctctgcccctcccgagacacccgctacctggtgttagcggtggaccgccctgcgggggcctggcgcggctccgggctggccttgaccctgcagccccgcggagaggactcccggctgagtaccgcccggctgcaggcactgctgttcggcgacgaccaccgctgcttcacacggatgaccccggccctgctcctgctgccgcggtccgagcccgcgccgctgcctgcgcacggccagctggacaccgtgcccttcccgccgcccaggccatccgcggaactcgaggagtcgccacccagcgcagaccccttcctggagacgctcacgcgcctggtgcgggcgctgcgggtccccccggcccgggcctccgcgccgcgcctggccctggatccggacgcgctggccggcttcccgcagggcctagtcaacctgtcggaccccgcggcgctggagcgcctactcgacggcgaggagccgctgctgctgctgctgaggcccactgcggccaccaccggggatcctgcgcccctgcacgaccccacgtcggcgccgtgggccacggccctggcgcgccgcgtggctgctgaactgcaagcggcggctgccgagctgcgaagcctcccgggtctgcctccggccacagccccgctgctggcgcgcctgctcgcgctctgcccaggtggccccggcggcctcggcgatcccctgcgagcgctgctgctcctgaaggcgctgcagggcctgcgcgtggagtggcgcgggcgggatccgcgcgggccgggtcgggcacagcgcagcgcgggggccaccgccgccgacgggccgtgcgcgctgcgcgagctcagcgtagacctccgcgccgagcgctccgtactcatccccgagacctaccaggccaacaattgccagggcgtgtgcggctggcctcagtccgaccgcaacccgcgctacggcaaccacgtggtgctgctgctgaagatgcaggcccgtggggccgccctggcgcgcccaccctgctgcgtgcccaccgcctacgcgggcaagctgctcatcagcctgtcggaggagcgcatcagcgcgcaccacgtgcccaacatggtggccaccgagtgtggctgccggtgacccctgcgccgcgcggactcctgccccgagggtccggacgcgccccagctcgcgccccttcccatatttattcggaccccaagcatcgccccaataaagaccagcaagcaaccggcaaaaaaaaaaaaaaaaaaaaaaaaaaaaaaaaaaaaaaaaaaaaaaa

SEQ ID NO: 239 - DNA, 533 bp, Homo sapiens
tgctcagttcatccctagaggcagctgctccaggaacagaggtgccatgcagccccgggtactccttgttgttgccctcctggcgctcctggcctctgcccgagcttcagaggccgaggatgcctcccttctcagcttcatgcagggttacatgaagcacgccaccaagaccgccaaggatgcactgagcagcgtgcaggagtcccaggtggcccagcaggccaggggctgggtgaccgatggcttcagttccctgaaagactactggagcaccgttaaggacaagttctctgagttctgggatttggaccctgaggtcagaccaacttcagccgtggctgcctgagacctcaataccccaagtccacctgcctatccatcctgcgagctccttgggtcctgcaatctccagggctgcccctgtaggttgcttaaaagggacagtattctcagtgctctcctaccccacctcatgcctggcccccctccaggcatgctggcctcccaataaagctggacaagaagctgctatg

SEQ ID NO: 240 - DNA, 1864 bp, Homo sapiens
ctggcggctcttgggactggcggggctgcgcgcggggttagggtgggggtacgggaaggctcaacccaggacctgcgtaccttgctttgggggcgcactaagcacctgccgggagcagggggcgcaccgggaactcgcagatttcgccagttgggcgcactggggatctgtggactgcgtccgggggatgggctagggggacatgcgcacgctttgggccttacagaatgtgatcgcgcgagggggagggcgaagcgtggcgggagggcgaggcgaaggaaggagggcgtgagaaaggcgacggcggcggcgcggaggagggttatctatacatttaaaaaccagccgcctgcgccgcgcctgcggagacctgggagagtccggccgcacgcgcgggacacgagcgtcccacgctccctggcgcgtacggcctgccaccactaggcctcctatccccgggctccagacgacctaggacgcgtgccctggggagttgcctggcggcgccgtgccagaagcccccttggggcgccacagttttccccgtcgcctccggttcctctgcctgcaccttcctgcggcgcgccgggacctggagcgggcgggtggatgcaggcgcgatggacggcggcacactgcccaggtccgcgccccctgcgccccccgtccctgtcggctgcgctgcccggcggagacccgcgtccccggaactgttgcgctgcagccggcggcggcgaccggccaccgcagagaccggaggcggcgcagcggccgtagcgcggcgcaatgagcgcgagcgcaaccgcgtgaagctggtgaacttgggcttccaggcgctgcggcagcacgtgccgcacggcggcgccagcaagaagctgagcaaggtggagacgctgcgctcagccgtggagtacatccgcgcgctgcagcgcctgctggccgagcacgacgccgtgcgcaacgcgctggcgggagggctgaggccgcaggccgtgcggccgtctgcgccccgcgggccgccagggaccaccccggtcgccgcctcgccctcccgcgcttcttcgtccccgggccgcgggggcagctcggagcccggctccccgcgttccgcctactcgtcggacgacagcggctgcgaaggcgcgctgagtcctgcggagcgcgagctactcgacttctccagctggttagggggctactgagcgccctcgacctatgagcctcagccccggaagccgagcgagcggccggcgcgctcatcgccggggagcccgccaggtggaccggcccgcgctccgcccccagcgagccggggacccacccaccaccccccgcaccgccgacgccgcctcgttcgtccggcccagcctgaccaatgccgcggtggaaacgggcttggagctggccccataagggctggcggcttcctccgacgccgcccctccccacagcttctcgactgcagtggggcggggggcaccaacacttggagatttttccggaggggagaggattttctaagggcacagagaatccattttctacacattaacttgagctgctggagggacactgctggcaaacggagacctatttttgtacaaagaacccttgacctggggcgtaataaagatgacctggacccctgcccccactatctggagttttccatgctggccaagatctggacacgagcagtccctgaggggcggggtccctggcgtgaggcccccgtgacagcccaccctggggtgggtttgtgggcactgctgctctgctagggagaagcctgtgtggggcacacctcttcaagggagcgtgaactttataaataaatcagttctgtttaaaaaaaaaaaaaaaa

SEQ ID NO: 241 - DNA, 948 bp, Homo sapiens
acatcctggaagagtggcctaggacagctcctctcctgccagagctaggcaggcgccgaagtagccgcatggccccgtcagaagatcccagggactggagagccaacctcaaaggcaccatccgtgagacaggcctggagaccagctccggtgggaagctggctggccatcagaagaccgtccccacggctcacctgacttttgttattgactgcacccacgggaagcagctctccctggcagcaaccgcatcaccaccccaagcccccagtcccaatcgagggcttgtcaccccaccaatgaagacttacatcgtgttctgtggggaaaactggccccatctgactcgggtgacccccatgggtgggggatgccttgcccaggccagggccaccctgccgctctgcagagggtctgtggcctcagcttccttcccagtcagcccgctctgcccccaggaggttcccgaggctaaggggaaacccgtgaaggctgcgcctgtgaggtcttcaacttggggaacagtcaaggactcactgaaagccctctcctcttgtgtctgtgggcaggccgattagctggaagggccgggctctgatgcccagaggctgcaattcccagggcctggccctgcttccccagctaagcaggagtcttttgtgcttgagccaaggaaacatcattagatccgctaaggggcatctgaaacatccgtcgagtggcagaggcaggataagtcacctgcacatgaagagactcattcattcatacagcaaatattactggtacatcttccacatgccaggccctgcaaagtgctggggagataccatggttttcctggagctggtatttttggggtggagggaacccaccctgaataaataaagtaacccaataaataaagaagatgatttcgaaaaaaaaaaaaaaaaaaaaaaaaaaaaa

SEQ ID NO: 242 - DNA, 1432 bp, Homo sapiens
ggggcgtgctcgcggctataaggggcggaggctgggcggcgttgctctgcgctctgcggctgacggcgcttttgtctccggtgagttttgtggcgggaagcttctgcgctggtgcttagtaaccgactttcctccggactcctgcacgacctgctcctacagccggcgatccactcccggctgttcccccggagggtccagaggcctttcagaaggagaaggcagctctgtttctctgcagaggagtagggtcctttcagccatgaagcatgtgttgaacctctacctgttaggtgtggtactgaccctactctccatcttcgttagagtgatggagtccctagagggcttactagagagcccatcgcctgggacctcctggaccaccagaagccaactagccaacacagagcccaccaagggccttccagaccatccatccagaagcatgtgataagacctccttccatactggccatattttggaacactgacctagacatgtccagatgggagtcccattcctagcagacaagctgagcaccgttgtaaccagagaactattactaggccttgaagaacctgtctaactggatgctcattgcctgggcaaggcctgtttaggccggttgcggtggctcatgcctgtaatcctagcactttgggaggctgaggtgggtggatcacctgaggtcaggagttcgagaccagcctcgccaacatggcgaaaccccatctctactaaaaatacaaaagttagctgggtgtggtggcagaggcctgtaatcccagctccttgggaggctgaggcgggagaattgcttgaacccggggacggaggttgcagtgagccgagatcgcactgctgtacccagcctgggccacagtgcaagactccatctcaaaaaaaaaagaaaagaaaaagcctgtttaatgcacaggtgtgagtggattgcttatggctatgagataggttgatctcgcccttaccccggggtctggtgtatgctgtgctttcctcagcagtatggctctgacatctcttagatgtcccaacttcagctgttgggagatggtgatattttcaaccctacttcctaaacatctgtctggggttcctttagtcttgaatgtcttatgctcaattatttggtgttgagcctctcttccacaagagctcctccatgtttggatagcagttgaagaggttgtgtgggtgggctgttgggagtgaggatggagtgttcagtgcccatttctcattttacattttaaagtcgttcctccaacatagtgtgtattggtctgaagggggtggtgggatgccaaagcctgctcaagttatggacattgtggccaccatgtggcttaaatgattttttctaactaataaagtggaatatatatttctaaaaaaaaaaaaaaaaaaaaa

SEQ ID NO: 243 - DNA, 4880 bp, Homo sapiens
aacgggcgccgcggcggggagaagacgcagagcgctgctgggctgccgggtctcccgcttccccctcctgctccaagggcctcctgcatgagggcgcggtagagacccggacccgcgccgtgctcctgccgtttcgctgcgctccgcccgggcccggctcagccaggccccgcggtgagccatgattcgcctcggggctccccagacgctggtgctgctgacgctgctcgtcgccgctgtccttcggtgtcagggccaggatgtccggcaaccaggaccaaagggacagaaaggagaacctggagacatcaaggatattgtaggacccaaaggacctcctgggcctcagggacctgcaggggaacaaggacccagaggggatcgtggtgacaaaggtgaaaaaggtgcccctggacctcgtggcagagatggagaacctgggacccctggaaatcctggcccccctggtcctcccggcccccctggtccccctggtcttggtggaaactttgctgcccagatggctggaggatttgatgaaaaggctggtggcgcccagttgggagtaatgcaaggaccaatgggccccatgggacctcgaggacctccaggccctgcaggtgctcctgggcctcaaggatttcaaggcaatcctggtgaacctggtgaacctggtgtctctggtcccatgggtccccgtggtcctcctggtccccctggaaagcctggtgatgatggtgaagctggaaaacctggaaaagctggtgaaaggggtccgcctggtcctcagggtgctcgtggtttcccaggaaccccaggccttcctggtgtcaaaggtcacagaggttatccaggcctggacggtgctaagggagaggcgggtgctcctggtgtgaagggtgagagtggttccccgggtgagaacggatctccgggcccaatgggtcctcgtggcctgcctggtgaaagaggacggactggccctgctggcgctgcgggtgcccgaggcaacgatggtcagccaggccccgcagggcctccgggtcctgtcggtcctgctggtggtcctggcttccctggtgctcctggagccaagggtgaagccggccccactggtgcccgtggtcctgaaggtgctcaaggtcctcgcggtgaacctggtactcctgggtcccctgggcctgctggtgcctccggtaaccctggaacagatggaattcctggagccaaaggatctgctggtgctcctggcattgctggtgctcctggcttccctgggccacggggccctcctggccctcaaggtgcaactggtcctctgggcccgaaaggtcagacgggtgaacctggtattgctggcttcaaaggtgaacaaggccccaagggagaacctggccctgctggcccccagggagcccctggacccgctggtgaagaaggcaagagaggtgcccgtggagagcctggtggcgttgggcccatcggtccccctggagaaagaggtgctcccggcaaccgcggtttcccaggtcaagatggtctggcaggtcccaagggagcccctggagagcgagggcccagtggtcttgctggccccaagggagccaacggtgaccctggccgtcctggagaacctggccttcctggagcccggggtctcactggccgccctggtgatgctggtcctcaaggcaaagttggcccttctggagcccctggtgaagatggtcgtcctggacctccaggtcctcagggggctcgtgggcagcctggtgtcatgggtttccctggccccaaaggtgccaacggtgagcctggcaaagctggtgagaagggactgcctggtgctcctggtctgaggggtcttcctggcaaagatggtgagacaggtgctgcaggaccccctggccctgctggacctgctggtgaacgaggcgagcagggtgctcctgggccatctgggttccagggacttcctggccctcctggtcccccaggtgaaggtggaaaaccaggtgaccagggtgttcccggtgaagctggagcccctggcctcgtgggtcccaggggtgaacgaggtttcccaggtgaacgtggctctcccggtgcccagggcctccagggtccccgtggcctccccggcactcctggcactgatggtcccaaaggtgcatctggcccagcaggcccccctggggctcagggccctccaggtcttcagggaatgcctggcgagaggggagcagctggtatcgctgggcccaaaggcgacaggggtgacgttggtgagaaaggccctgagggagcccctggaaaggatggtggacgaggcctgacaggtcccattggcccccctggcccagctggtgctaatggcgagaagggagaagttggacctcctggtcctgcaggaagtgctggtgctcgtggcgctccgggtgaacgtggagagactgggccccccggaccagcgggatttgctgggcctcctggtgctgatggccagcctggggccaagggtgagcaaggagaggccggccagaaaggcgatgctggtgcccctggtcctcagggcccctctggagcacctgggcctcagggtcctactggagtgactggtcctaaaggagcccgaggtgcccaaggccccccgggagccactggattccctggagctgctggccgcgttggacccccaggctccaatggcaaccctggaccccctggtccccctggtccttctggaaaagatggtcccaaaggtgctcgaggagacagcggcccccctggccgagctggtgaacccggcctccaaggtcctgctggaccccctggcgagaagggagagcctggagatgacggtccctctggtgccgaaggtccaccaggtccccagggtctggctggtcagagaggcatcgtcggtctgcctgggcaacgtggtgagagaggattccctggcttgcctggcccgtcgggtgagcccggcaagcagggtgctcctggagcatctggagacagaggtcctcctggccccgtgggtcctcctggcctgacgggtcctgcaggtgaacctggacgagagggaagccccggtgctgatggcccccctggcagagatggcgctgctggagtcaagggtgatcgtggtgagactggtgctgtgggagctcctggagcccctgggccccctggctcccctggccccgctggtccaactggcaagcaaggagacagaggagaagctggtgcacaaggccccatgggaccctcaggaccagctggagcccggggaatccagggtcctcaaggccccagaggtgacaaaggagaggctggagagcctggcgagagaggcctgaagggacaccgtggcttcactggtctgcagggtctgcccggccctcctggtccttctggagaccaaggtgcttctggtcctgctggtccttctggccctagaggtcctcctggccccgtcggtccctctggcaaagatggtgctaatggaatccctggccccattgggcctcctggtccccgtggacgatcaggcgaaaccggccctgctggtcctcctggaaatcctggaccccctggtcctccaggtccccctggccctggcatcgacatgtccgcctttgctggcttaggcccgagagagaagggccccgaccccctgcagtacatgcgggccgaccaggcagccggtggcctgagacagcatgacgccgaggtggatgccacactcaagtccctcaacaaccagattgagagcatccgcagccccgagggctcccgcaagaaccctgctcgcacctgcagagacctgaaactctgccaccctgagtggaagagtggagactactggattgaccccaaccaaggctgcaccttggacgccatgaaggttttctgcaacatggagactggcgagacttgcgtctaccccaatccagcaaacgttcccaagaagaactggtggagcagcaagagcaaggagaagaaacacatctggtttggagaaaccatcaatggtggcttccatttcagctatggagatgacaatctggctcccaacactgccaacgtccagatgaccttcctacgcctgctgtccacggaaggctcccagaacatcacctaccactgcaagaacagcattgcctatctggacgaagcagctggcaacctcaagaaggccctgctcatccagggctccaatgacgtggagatccgggcagagggcaatagcaggttcacgtacactgccctgaaggatggctgcacgaaacataccggtaagtggggcaagactgttatcgagtaccggtcacagaagacctcacgcctccccatcattgacattgcacccatggacataggagggcccgagcaggaattcggtgtggacatagggccggtctgcttcttgtaaaaacctgaacccagaaacaacacaatccgttgcaaacccaaaggacccaagtactttccaatctcagtcactctaggactctgcactgaatggctgacctgacctgatgtccattcatcccaccctctcacagttcggacttttctcccctctctttctaagagacctgaactgggcagactgcaaaataaaatctcggtgttctatttatttattgtcttcctgtaagaccttcgggtcaaggcagaggcaggaaactaactggtgtgagtcaaatgccccctgagtgactgcccccagcccaggccagaagacctcccttcaggtgccgggcgcaggaactgtgtgtgtcctacacaatggtgctattctgtgtcaaacacctctgtattttttaaaacatcaattgatattaaaaatgaaaagattattggaaagtaca

SEQ ID NO: 244 - DNA, 2831 bp, Homo sapiens
agcgccgggagactctgccgtcggtgcgtgcgcggacacgcacccgtcccccttggtctcgccgccagccatggccgccgctacggcctccccccgcagcctccttgttctcctccaggtggtagtgctcgctctggcgcagattagaggtccaccgggagagcggggccccccgggtcccccgggaccgccgggagtgcctggatccgacggcatcgacggtgacaatgggccccctggaaaagctggccctccgggacccaagggcgagcctggcaaagctgggccagatgggccagacgggaagcccgggattgatggtttaactggagccaagggggagcctggccccatggggatccctggagtcaagggccagcccgggcttcctggtcctcctggccttccgggccctggttttgctggacctcctgggcctcctggacctgttggcctccctggtgagattggaatccgaggccccaagggggaccctggaccagatggaccatcggggcccccaggaccccctgggaaacctggtcgcccgggaaccatccagggtctggaaggcagtgcggatttcctgtgtccaaccaactgtccacccggaatgaaaggtcccccagggctgcagggagtgaaggggcatgcgggcaaacgcgggattctgggtgatcctggccaccaggggaagccgggtcccaagggagatgtgggtgcctctggagagcaaggcatccctggaccaccgggtccccagggcatcaggggctacccaggcatggcagggcccaagggagagacgggccctcatggatataaaggcatggtgggcgctatcggtgccactgggccaccgggtgaggaaggtcctaggggaccgccaggccgagctggggagaagggtgacgagggcagcccaggtattcgtggaccccaggggatcacaggcccgaaaggagcaacgggccccccaggcatcaacggcaaggatgggaccccaggcacgcctggcatgaagggcagtgcaggacaggcgggacagcccggaagtccaggccaccagggcctagcgggtgtgccaggccagcctgggacaaaaggaggccctggagaccagggtgagccgggcccgcagggccttcctggattctctggtccccctgggaaagagggagagccagggcctcgaggagaaattggtccccagggcatcatgggacagaagggtgaccaaggcgagaggggtccagtggggcaaccaggccctcagggaaggcagggccctaagggggagcagggcccccccggaattccagggccccaaggcttgccaggcgtcaaaggagacaagggctccccagggaagaccgggccccgcggcaaagtgggtgacccaggggtggccggcctccccggagagaaaggcgagaagggcgagtccggcgagccggggcccaagggacagcaaggagtacgtggagaacccggctaccctggccccagcggggatgcgggcgccccaggggttcagggctaccctggtccccccggccctcgaggactggccgggaaccgaggcgtgccaggacagcccgggagacagggcgtggagggccgggatgccactgaccagcacatcgtggatgtggcgctgaagatgctgcaagagcaactggcagaggtcgccgtgagtgccaagcgggaagccctgggtgcggtgggcatgatgggtcctccaggacctcctgggccccctgggtacccaggcaagcagggcccccatgggcaccctggccctcggggcgttcctggcatcgtgggagccgtgggtcagatcggcaacacggggcccaagggaaaacgtggagagaagggtgatccaggagaagtgggacgggggcaccccgggatgcctgggcccccagggatcccaggactccctggccggcctggccaggcaatcaacggcaaggatggagatcgagggtccccaggggctccaggagaggcaggtcgacctggcctgccaggccccgtggggctgccgggcttctgtgaacctgccgcctgccttggagcttcggcctatgcctctgcccgccttacagagcctggatccatcaaggggccttgagcatcaggcccagacagagcctggcaggcatcctggcgggaaggaccaggtcccctctgggtggacatgcacccatccccagtccaggaaaccatctcccccaggaccttctgtctgggactcaggagtcctaaggaaaaggaattctaaaacatgggggaaggggaggtagagcactgatgggtgaaaaagtgaggccaacacacagggcaagtggtgtcgatggagtcgaagcgctgaaggaatagggcggctttccttccagcgagcatcattcggctgttaccaaaacaaacatcttaatctgcacctttctccactggccatcttgtccttgggtcagtgggacatgggcacctcgggaggcccgggccctgcccagctacagttccacccctcagcttgaggaccaatgactgaggtctatgccagttcctgatcccatctcactctctggacctaccaggtgactgctgctgggtgactcccctgaggcggctatacccttaagccagccccactacttccttccctgcctcccagctcagtatttaaacatcatctcccttctctttctcgcataactccccacccctttctccccgatccacccaggcctttctgtaaataaaagctcccaagttgggtacaaaccaggatattggagttactctatcctggagttaactag

SEQ ID NO: 245 - DNA, 2471 bp, Homo sapiens
agaaagcgagcagccacccagctccccgccaccgccatggtccccgacaccgcctgcgttcttctgctcaccctggctgccctcggcgcgtccggacagggccagagcccgttgggctcagacctgggcccgcagatgcttcgggaactgcaggaaaccaacgcggcgctgcaggacgtgcgggagctgctgcggcagcaggtcagggagatcacgttcctgaaaaacacggtgatggagtgtgacgcgtgcgggatgcagcagtcagtacgcaccggcctacccagcgtgcggcccctgctccactgcgcgcccggcttctgcttccccggcgtggcctgcatccagacggagagcggcgcgcgctgcggcccctgccccgcgggcttcacgggcaacggctcgcactgcaccgacgtcaacgagtgcaacgcccacccctgcttcccccgagtccgctgtatcaacaccagcccggggttccgctgcgaggcttgcccgccggggtacagcggccccacccaccagggcgtggggctggctttcgccaaggccaacaagcaggtttgcacggacatcaacgagtgtgagaccgggcaacataactgcgtccccaactccgtgtgcatcaacacccggggctccttccagtgcggcccgtgccagcccggcttcgtgggcgaccaggcgtccggctgccagcggcgcgcacagcgcttctgccccgacggctcgcccagcgagtgccacgagcatgcagactgcgtcctagagcgcgatggctcgcggtcgtgcgtgtgtgccgttggctgggccggcaacgggatcctctgtggtcgcgacactgacctagacggcttcccggacgagaagctgcgctgcccggagcgccagtgccgtaaggacaactgcgtgactgtgcccaactcagggcaggaggatgtggaccgcgatggcatcggagacgcctgcgatccggatgccgacggggacggggtccccaatgaaaaggacaactgcccgctggtgcggaacccagaccagcgcaacacggacgaggacaagtggggcgatgcgtgcgacaactgccggtcccagaagaacgacgaccaaaaggacacagaccaggacggccggggcgatgcgtgcgacgacgacatcgacggcgaccggatccgcaaccaggccgacaactgccctagggtacccaactcagaccagaaggacagtgatggcgatggtataggggatgcctgtgacaactgtccccagaagagcaacccggatcaggcggatgtggaccacgactttgtgggagatgcttgtgacagcgatcaagaccaggatggagacggacatcaggactctcgggacaactgtcccacggtgcctaacagtgcccaggaggactcagaccacgatggccagggtgatgcctgcgacgacgacgacgacaatgacggagtccctgacagtcgggacaactgccgcctggtgcctaaccccggccaggaggacgcggacagggacggcgtgggcgacgtgtgccaggacgactttgatgcagacaaggtggtagacaagatcgacgtgtgtccggagaacgctgaagtcacgctcaccgacttcagggccttccagacagtcgtgctggacccggagggtgacgcgcagattgaccccaactgggtggtgctcaaccagggaagggagatcgtgcagacaatgaacagcgacccaggcctggctgtgggttacactgccttcaatggcgtggacttcgagggcacgttccatgtgaacacggtcacggatgacgactatgcgggcttcatctttggctaccaggacagctccagcttctacgtggtcatgtggaagcagatggagcaaacgtattggcaggcgaaccccttccgtgctgtggccgagcctggcatccaactcaaggctgtgaagtcttccacaggccccggggaacagctgcggaacgctctgtggcatacaggagacacagagtcccaggtgcggctgctgtggaaggacccgcgaaacgtgggttggaaggacaagaagtcctatcgttggttcctgcagcaccggccccaagtgggctacatcagggtgcgattctatgagggccctgagctggtggccgacagcaacgtggtcttggacacaaccatgcggggtggccgcctgggggtcttctgcttctcccaggagaacatcatctgggccaacctgcgttaccgctgcaatgacaccatcccagaggactatgagacccatcagctgcggcaagcctagggaccagggtgaggacccgccggatgacagccaccctcaccgcggctggatgggggctctgcacccagccccaaggggtggccgtcctgagggggaagtgagaagggctcagagaggacaaaataaagtgtgtgtgcagggaaaaaaaaaaaaaaaaaaaa

SEQ ID NO: 246 - DNA, 4334 bp, Homo sapiens
gcaataaatgctcgcgaacgcgagagagcgacggaagcgctaggcgcctggttctgcgcgtactggctgtacggagcaggagcaagaggtcgccgccagcctccgccgccgagcctcgttcgtgtccccgcccctcgctcctgcagctactgctcagaaacgctggggcgcccaccctggcagactaacgaagcagctcccttcccaccccaactgcaggtctaattttggacgctttgcctgccatttcttccaggttgagggagccgcagaggcggaggctcgcgtattcctgcagtcagcacccacgtcgcccccggacgctcggtgctcaggcccttcgcgagcggggctctccgtctgcggtcccttgtgaaggctctgggcggctgcagaggccggccgtccggtttggctcacctctcccaggaaacttcacactggagagccaaaaggagtggaagagcctgtcttggagattttcctggggaaatcctgaggtcattcattatgaagtgtaccgcgcgggagtggctcagagtaaccacagtgctgttcatggctagagcaattccagccatggtggttcccaatgccactttattggagaaacttttggaaaaatacatggatgaggatggtgagtggtggatagccaaacaacgagggaaaagggccatcacagacaatgacatgcagagtattttggaccttcataataaattacgaagtcaggtgtatccaacagcctctaatatggagtatatgacatgggatgtagagctggaaagatctgcagaatcctgggctgaaagttgcttgtgggaacatggacctgcaagcttgcttccatcaattggacagaatttgggagcacactggggaagatataggcccccgacgtttcatgtacaatcgtggtatgatgaagtgaaagactttagctacccatatgaacatgaatgcaacccatattgtccattcaggtgttctggccctgtatgtacacattatacacaggtcgtgtgggcaactagtaacagaatcggttgtgccattaatttgtgtcataacatgaacatctgggggcagatatggcccaaagctgtctacctggtgtgcaattactccccaaagggaaactggtggggccatgccccttacaaacatgggcggccctgttctgcttgcccacctagttttggagggggctgtagagaaaatctgtgctacaaagaagggtcagacaggtattatccccctcgagaagaggaaacaaatgaaatagaacgacagcagtcacaagtccatgacacccatgtccggacaagatcagatgatagtagcagaaatgaagtcataagcgcacagcaaatgtcccaaattgtttcttgtgaagtaagattaagagatcagtgcaaaggaacaacctgcaataggtacgaatgtcctgctggctgtttggatagtaaagctaaagttattggcagtgtacattatgaaatgcaatccagcatctgtagagctgcaattcattatggtataatagacaatgatggtggctgggtagatatcactagacaaggaagaaagcattatttcatcaagtccaatagaaatggtattcaaacaattggcaaatatcagtctgctaattccttcacagtctctaaagtaacagttcaggctgtgacttgtgaaacaactgtggaacagctctgtccatttcataagcctgcttcacattgcccaagagtatactgtcctcgtaactgtatgcaagcaaatccacattatgctcgtgtaattggaactcgagtttattctgatctgtccagtatctgcagagcagcagtacatgctggagtggttcgaaatcacggtggttatgttgatgtaatgcctgtggacaaaagaaagacctacattgcttcttttcagaatggaatcttctcagaaagtttacagaatcctccaggaggaaaggcattcagagtgtttgctgttgtgtgaaactgaatacttggaagaggaccataaagactattccaaatgcaatatttctgaattttgtataaaactgtaacattactgtacagagtacatcaactattttcagcccaaaaaggtgccaaatgcatataaatcttgataaacaaagtctataaaataaaacatgggacattagctttgggaaaagtaatgaaaatataatggttttagaaatcctgtgttaaatattgctatattttcttagcagttatttctacagttaattacatagtcatgattgttctacgtttcatatattatatggtgctttgtatatgccactaataaaatgaatctaaacattgaatgtgaatggccctcagaaaatcatctagtgcatttaaaaataatcgactctaaaactgaaagaaaccttatcacattttccccagttcaatgctatgccattaccaactccaaataatctcaaataattttccacttaataactgtaaagtttttttctgttaatttaggcatatagaatattaaattctgatattgcacttcttattttatataaaataatcctttaatatccaaatgaatctgttaaaatgtttgattccttgggaatggccttaaaaataaatgtaataaagtcagagtggtggtatgaaaacattcctagtgatcatgtagtaaatgtagggttaagcatggacagccagagctttctatgtactgttaaaattgaggtcacatattttcttttgtatcctggcaaatactcctgcaggccaggaagtataatagcaaaaagttgaacaaagatgaactaatgtattacattaccattgccactgatttttttttaaatggtaaatgaccttgtatataaatattgccatatcatggtacctataatggtgatatatttgtttctatgaaaaatgtattgtgctttgatactaaaaatctgtaaaatgttagttttggtaattttttttctgctggtggatttacatattaaattttttctgctggtggataaacattaaaattaatcatgtttcaaagttttattttcagttccttttgcatgcctattttgatttagaaatcactttaagataaatgaacaaaattattgtaagtcttctaaacttggtttattgacgttagtataaataacatacaataccagatgtctacaaaatcgacctgattatttaggtatttgtatgtgaaagagaaacacatatttagaaacacagcaagggagattttgaataaagagagagatgaatttataaagtaggaaaaaaagaatctgaaagatacaaagtgattataaaagaattgacaggacaataaatacttcaaatacttttaggaagtaaatgagtaggagtttaggagggataaacgagataaattccatgcaatgatcaaggaaagcaagagagcagataatacaaaagaaaaagaagaaggttcacataaatagcttctggagtgcaaattataaagacatcaacatttttgatcatataataagtactggcttacagctaagtggttccaaatactggtaattaaaacaatgatgtatacgttaaagattgcaaaacttaaaagcagatttttatgggaacttttttcgaaaggatacatgaccaccttcttaaatagtatgactttacatagactctttttctggtccttactgctcctcccacaacagggaagcccgatcagttctgtcagtataaggttttcttctatttgcccttagtttagatctccatcatcaattccacttactattgtaataccttcagctggagcctgtgtctttctccattcctttttaatacattcgtatttcccagccccagaacccttgaaattaactcttccatgagttttcattgctgaagaaaaaccaaacattcttgtaaaaacatttaagaacttccatagtcttgttcatattgtttacctatcttctacacaaggcgtgtccttgggtaagttatttaacttcaatttaccttacctgtaaaatggaacaaataatatctccttaagattgctctacgaattaattgacacattatgtgtgatgtacttaaaggaataataaatgcataatatgaggtcagtggacgccattttctgttataatcatttttgttatctaatttggggaaactattcatctgtcatatactattgatcctttggcacttaaataaatgtgaaatcctccaggaattttcctgtgattctccttgtaagaattaaatgctctctaatatgatatccctttaaaaaaa

SEQ ID NO: 247 - DNA, 2024 bp, Homo sapiens
aaggcaagagatctaggacttctagcccctgaactttcagccgaatacatcttttccaaaggagtgaattcaggcccttgtatcactggcagcaggacgtgaccatggagaagctgttgtgtttcttggtcttgaccagcctctctcatgcttttggccagacagacatgtcgaggaaggcttttgtgtttcccaaagagtcggatacttcctatgtatccctcaaagcaccgttaacgaagcctctcaaagccttcactgtgtgcctccacttctacacggaactgtcctcgacccgtgggtacagtattttctcgtatgccaccaagagacaagacaatgagattctcatattttggtctaaggatataggatacagttttacagtgggtgggtctgaaatattattcgaggttcctgaagtcacagtagctccagtacacatttgtacaagctgggagtccgcctcagggatcgtggagttctgggtagatgggaagcccagggtgaggaagagtctgaagaagggatacactgtgggggcagaagcaagcatcatcttggggcaggagcaggattccttcggtgggaactttgaaggaagccagtccctggtgggagacattggaaatgtgaacatgtgggactttgtgctgtcaccagatgagattaacaccatctatcttggcgggcccttcagtcctaatgtcctgaactggcgggcactgaagtatgaagtgcaaggcgaagtgttcaccaaaccccagctgtggccctgaggcccagctgtgggtcctgaaggtacctcccggttttttacaccgcatgggccccacgtctctgtctctggtacctcccgcttttttacactgcatggttcccacgtctctgtctctgggcctttgttcccctatatgcattgcaggcctgctccaccctcctcagcgcctgagaatggaggtaaagtgtctggtctgggagctcgttaactatgctgggaaacggtccaaaagaatcagaatttgaggtgttttgttttcatttttatttcaagttggacagatcttggagataatttcttacctcacatagatgagaaaactaacacccagaaaggagaaatgatgttataaaaaactcataaggcaagagctgagaaggaagcgctgatcttctatttaattccccacccatgacccccagaaagcaggagggcattgcccacattcacagggctcttcagtctcagaatcaggacactggccaggtgtctggtttgggtccagagtgctcatcatcatgtcatagaactgctgggcccaggtctcctgaaatgggaagcccagcaataccacgcagtccctccactttctcaaagcacactggaaaggccattagaattgccccagcagagcagatctgctttttttccagagcaaaatgaagcactaggtataaatatgttgttactgccaagaacttaaatgactggtttttgtttgcttgcagtgctttcttaattttatggctcttctgggaaactcctccccttttccacacgaaccttgtggggctgtgaattctttcttcatccccgcattcccaatatacccaggccacaagagtggacgtgaaccacagggtgtcctgtcagaggagcccatctcccatctccccagctccctatctggaggatagttggatagttacgtgttcctagcaggaccaactacagtcttcccaaggattgagttatggactttgggagtgagacatcttcttgctgctggatttccaagctgagaggacgtgaacctgggaccaccagtagccatcttgtttgccacatggagagagactgtgaggacagaagccaaactggaagtggaggagccaagggattgacaaacaacagagccttgaccacgtggagtctctgaatcagccttgtctggaaccagatctacacctggactgcccaggtctataagccaataaagcccctgtttacttgaaaaaaaaaa

SEQ ID NO: 248 - DNA, 782 bp, Homo sapiens
gggctccctgcctcgggctctcaccctcctctcctgcagctccagctttgtgctctgcctctgaggagaccatggcccagtatctgagtaccctgctgctcctgctggccaccctagctgtggccctggcctggagccccaaggaggaggataggataatcccgggtggcatctataacgcagacctcaatgatgagtgggtacagcgtgcccttcacttcgccatcagcgagtataacaaggccaccaaagatgactactacagacgtccgctgcgggtactaagagccaggcaacagaccgttgggggggtgaattacttcttcgacgtagaggtgggccgcaccatatgtaccaagtcccagcccaacttggacacctgtgccttccatgaacagccagaactgcagaagaaacagttgtgctctttcgagatctacgaagttccctgggagaacagaaggtccctggtgaaatccaggtgtcaagaatcctagggatctgtgccaggccattcgcaccagccaccacccactcccaccccctgtagtgctcccacccctggactggtggcccccaccctgcgggaggcctccccatgtgcctgcgccaagagacagacagagaaggctgcaggagtcctttgttgctcagcagggcgctctgccctccctccttccttcttgcttctaatagccctggtacatggtacacacccccccacctcctgcaattaaacagtagcatcgcctccctctgaaaaaaaaaaaaaaaaaaaaaaa

SEQ ID NO: 249 - DNA, 449 bp, Homo sapiens
atatccactcctgctctccctcctgcaggtgaccccagccatgaggaccatcgccatccttgctgccattctcctggtggccctgcaggcccaggctgagtcactccaggaaagagctgatgaggctacaacccagaagcagtctggggaagacaaccaggaccttgctatctcctttgcaggaaatggactctctgctcttagaacctcaggttctcaggcaagagccacctgctattgccgaaccggccgttgtgctacccgtgagtccctctccggggtgtgtgaaatcagtggccgcctctacagactctgctgtcgctgagcttcctagatagaaaccaaagcagtgcaagattcagttcaaggtcctgaaaaaagaaaaacattttactctgtgtaccttgtgtctttctaaatttctctctccaaaataaagttcaagcatt

SEQ ID NO: 250 - DNA, 4727 bp, Homo sapiens
ttcatttcccagacttagcacaatctcatccgctctaaacaacctcatcaaaactactttctggtcagagagaagcaataattattattaacatttattaacgatcaataaacttgatcgcattatggccagcactattaaggaactctcctgatgaatgcagtgtggccaaaggcgggaagatggtgggcagcccagacaccgttgggatgaactacggcagctacatggaggagaagcacatgccacccccaaacatgaccacgaacgagcgcagagttatcgtgccagcagatcctacgctatggagtacagaccatgtgcggcagtggctggagtgggcggtgaaagaatatggccttccagacgtcaacatcttgttattccagaacatcgatgggaaggaactgtgcaagatgaccaaggacgacttccagaggctcacccccagctacaacgccgacatccttctctcacatctccactacctcagagagactcctcttccacatttgacttcagatgatgttgataaagccttacaaaactctccacggttaatgcatgctagaaacacagggggtgcagcttttattttcccaaatacttcagtatatcctgaagctacgcaaagaattacaactaggccagatttaccatatgagccccccaggagatcagcctggaccggtcacggccaccccacgccccagtcgaaagctgctcaaccatctccttccacagtgcccaaaactgaagaccagcgtcctcagttagatccttatcagattcttggaccaacaagtagccgccttgcaaatccaggcagtggccagatccagctttggcagttcctcctggagctcctgtcggacagctccaactccagctgcatcacctgggaaggcaccaacggggagttcaagatgacggatcccgacgaggtggcccggcgctggggagagcggaagagcaaacccaacatgaactacgataagctcagccgcgccctccgttactactatgacaagaacatcatgaccaaggtccatgggaagcgctacgcctacaagttcgacttccacgggatcgcccaggccctccagccccaccccccggagtcatctctgtacaagtacccctcagacctcccgtacatgggctcctatcacgcccacccacagaagatgaactttgtggcgccccaccctccagccctccccgtgacatcttccagtttttttgctgccccaaacccatactggaattcaccaactgggggtatataccccaacactaggctccccaccagccatatgccttctcatctgggcacttactactaaagacctggcggaggcttttcccatcagcgtgcattcaccagcccatcgccacaaactctatcggagaacatgaatcaaaagtgcctcaagaggaatgaaaaaagctttactggggctggggaaggaagccggggaagagatccaaagactcttgggagggagttactgaagtcttactacagaaatgaggaggatgctaaaaatgtcacgaatatggacatatcatctgtggactgaccttgtaaaagacagtgtatgtagaagcatgaagtcttaaggacaaagtgccaaagaaagtggtcttaagaaatgtataaactttagagtagagtttggaatcccactaatgcaaactgggatgaaactaaagcaatagaaacaacacagttttgacctaacataccgtttataatgccattttaaggaaaactacctgtatttaaaaatagaaacatatcaaaaacaagagaaaagacacgagagagactgtggcccatcaacagacgttgatatgcaactgcatggcatgtgctgttttggttgaaatcaaatacattccgtttgatggacagctgtcagctttctcaaactgtgaagatgacccaaagtttccaactcctttacagtattaccgggactatgaactaaaaggtgggactgaggatgtgtatagagtgagcgtgtgattgtagacagaggggtgaagaaggaggaggaagaggcagagaaggaggagaccagggctgggaaagaaacttctcaagcaatgaagactggactcaggacatttggggactgtgtacaatgagttatggagactcgagggttcatgcagtcagtgttataccaaacccagtgttaggagaaaggacacagcgtaatggagaaaggggaagtagtagaattcagaaacaaaaatgcgcatctctttctttgtttgtcaaatgaaaattttaactggaattgtctgatatttaagagaaacattcaggacctcatcattatgtgggggctttgttctccacagggtcaggtaagagatggccttcttggctgccacaatcagaaatcacgcaggcattttgggtaggcggcctccagttttcctttgagtcgcgaacgctgtgcgtttgtcagaatgaagtatacaagtcaatgtttttccccctttttatataataattatataacttatgcatttatacactacgagttgatctcggccagccaaagacacacgacaaaagagacaatcgatataatgtggccttgaattttaactctgtatgcttaatgtttacaatatgaagttattagttcttagaatgcagaatgtatgtaataaaataagcttggcctagcatggcaaatcagatttatacaggagtctgcatttgcactttttttagtgactaaagttgcttaatgaaaacatgtgctgaatgttgtggattttgtgttataatttactttgtccaggaacttgtgcaagggagagccaaggaaataggatgtttggcacccaaatggcgtcagcctctccaggtccttcttgcctcccctcctgtcttttatttctagccccttttggaacagaaggaccccgggtttcacattggagcctccatatttatgcctggaatggaaagaggcctatgaagctggggttgtcattgagaaattctagttcagcacctggtcacaaatcacccttaattcctgctatgattaaaatacatttgttgaacagtgaacaagctaccactcgtaaggcaaactgtattattactggcaaataaagcgtcatggatagctgcaatttctcactttacagaaacaagggataacgtctagatttgctgcggggtttctctttcaggagctctcactaggtagacagctttagtcctgctacatcagagttacctgggcactgtggcttgggattcactagccctgagcctgatgttgctggctatcccttgaagacaatgtttatttccataatctagagtcagtttccctgggcatcttttctttgaatcacaaatgctgccaaccttggtccaggtgaaggcaactcaaaaggtgaaaatacaaggtgaccgtgcgaaggcgctagccgaaacatcttagctgaataggtttctgaactggcccttttcatagctgtttcagggcctgtttttttcacgttgcagtccttttgctatgattatgtgaagttgccaaacctctgtgctgtggatgttttggcagtgggctttgaagtcggcaggacacgattaccaatgctcctgacaccccgtgtcatttggattagacggagcccaaccatccatcattttgcagcagcctgggaaggcccacaaagtgcccgtatctccttagggaaaataaataaatacaatcatgaaagctggcagttaggctgacccaaactgtgctaatggaaaagatcagtcatttttattttggaatgcaaagtcaagacacacctacattcttcatagaaatacacatttacttggataatcactcagttctctcttcaagactgtctcatgagcaagatcataaaaacaagacatgattatcatattcaattttaacagatgttttccattagatccctcaaccctccacccccagtccaggttattagcaagtcttatgagcaactgggataattttggataacatgataatactgagttccttcaaatacataattcttaaattgtttcaaaatggcattaactctctgttactgttgtaatctaattccaaagccccctccaggtcatattcataattgcatgaaccttttctctctgtttgtccctgtctcttggcttgccctgatgtatactcagactcctgtacaatcttactcctgctggcaagagatttgtcttcttttcttgtcttcaattggctttcgggccttgtatgtggtaaaatcaccaaatcacagtcaagactgtgtttttgttcctagtttgatgcccttatgtcccggaggggttcacaaagtgctttgtcaggactgctgcagttagaaggctcactgcttctcctaagccttctgcacagatgtggcacctgcaacccaggagcaggagccggaggagctgccctctgacagcaggtgcagcagagatggctacagctcaggagctgggaaggtgatggggcacagggaaagcacagatgttctgcagcgccccaaagtgacccattgcctggagaaagagaagaaaatattttttaaaaagctagtttatttagcttctcattaattcattcaaataaagtcgtgaggtgactaattagagaataaaaattactttggactactcaaaaatacaccaaaaaaaa

SEQ ID NO: 251 - DNA, 1322 bp, Homo sapiens
tcctcaaaggaggggcagagcctgcgcagggcaggagcagctggcccactggcggcccgcaacactccgtctcaccctctgggcccactgcatctagaggagggccgtctgtgaggccactacccctccagcaactgggaggtgggactgtcagaagctggcccagggtggtggtcagctgggtcagggacctacggcacctgctggaccacctcgccttctccatcgaagcagggaagtgggagcctcgagccctcgggtggaagctgaccccaagccacccttcacctggacaggatgagagtgtcaggtgtgcttcgcctcctggccctcatctttgccatagtcacgacatggatgtttattcgaagctacatgagcttcagcatgaaaaccatccgtctgccacgctggctggcagcctcgcccaccaaggagatccaggttaaaaagtacaagtgtggcctcatcaagccctgcccagccaactactttgcgtttaaaatctgcagtggggccgccaacgtcgtgggccctactatgtgctttgaagaccgcatgatcatgagtcctgtgaaaaacaatgtgggcagaggcctaaacatcgccctggtgaatggaaccacgggagctgtgctgggacagaaggcatttgacatgtactctggagatgttatgcacctagtgaaattccttaaagaaattccggggggtgcactggtgctggtggcctcctacgacgatccagggaccaaaatgaacgatgaaagcaggaaactcttctctgacttggggagttcctacgcaaaacaactgggcttccgggacagctgggtcttcataggagccaaagacctcaggggtaaaagcccctttgagcagttcttaaagaacagcccagacacaaacaaatacgagggatggccagagctgctggagatggagggctgcatgcccccgaagccattttagggtggctgtggctcttcctcagccaggggcctgaagaagctcctgcctgacttaggagtcagagcccggcaggggctgaggaggaggagcagggggtgctgcgtggaaggtgctgcaggtccttgcacgctgtgtcgcgcctctcctcctcggaaacagaaccctcccacagcacatcctacccggaagaccagcctcagagggtccttctggaaccagctgtctgtggagagaatggggtgctttcgtcagggactgctgacggctggtcctgaggaaggacaaactgcccagacttgagcccaattaaattttatttttgctggttttgaatgaaaaaaaaaaaaaaa

SEQ ID NO: 252 - DNA, 1901 bp, Homo sapiens
gcggcgagtggagcgggagccgactggaagaagggctctagggagggggctgtggctgctggggtccgaggtggggccgggtacaccagccccatcactgtttgcagagagtcagggaggcggaaaagacacgcgctctaggctcccatcagggcacatggcccgggcccatcccccgcgcgtctccccggctgcggggcgcggggggctgccgggtgcgcttggctgtggcgcggcgcgttggagactttattgcgatgggacgataagaggggcgggggcggggtcctgggggccgaggcggcagcgctttaattaaaacggaaattgcggccccgggccgcgcgggggccggagggttccaagcggccccttagctggaagcgtttctccaggacccccccgcaacccccgccacgcccgggctgccccctcccgccaggccctgccggacccggcgccgtcttctcctccttgtcacccgcggtcgcttcgggcggggatcggtgccaccgagcgcaaagcctgcctcgccccccttccccgtcccccccatctcccaccgcccagtccccggcggcgatgagacagagcggcgcctcccagcccctgctgatcaacatgtacctgccagatcccgtcggagacggtctcttcaaggacgggaagaacccgagctgggggccgctgagccccgcggttcagaaaggcagcggacagatccagctgtggcagtttctgctggagctgctggctgaccgcgcgaacgccggctgcatcgcgtgggagggcggtcacggcgagttcaagctcacggacccggacgaggtggcgcggcggtggggcgagcgcaagagcaagcccaacatgaactacgacaagctgagccgcgccctgcgctactactacgacaagaacatcatgagcaaggtgcatggcaagcgctacgcctaccgcttcgacttccagggcctggcgcaggcctgccagccgccgcccgcgcacgctcatgccgccgccgcagctgctgccgccgccgcggccgcccaggacggcgcgctctacaagctgcccgccggcctcgccccgctgcccttccccggcctctccaaactcaacctcatggccgcctcggccggggtcgcgcccgccggcttctcctactggccgggcccgggccccgccgccaccgctgccgccgccaccgccgcgctctaccccagtcccagcttgcagcccccgcccgggcccttcggggccgtggccgcagcctcgcacttggggggccattaccactagacggggcggtcgggtgcctgcggcctcgcccgcacgcctagagtctcgcccgatcccatcggcatcccggggagggcccgggagcctccgtcaaccgtcctctaatccagagtttactccacctgccgcacttagcagggggacgggaccgaagctccctcaatccttgtctggtactagatttgctcctgtcccaccccgcagtcccctgaggagggcgatgtgcgccctctttcactttttttcttctaggtctccaggtcccggaggggatttgtggacctctcttgtctccccaccactccagtgcatttccgcctggctcctagaagccccattcaatatcactactctttaacgagtgccaaatcttttcccacttttgctcttccccaaggaactgctcccacctcagcacgtggaggcctctcacggtcctccttcctgggacctgagcaggtttggtgaaagccaccgtcctccgtgacacacggcccccttcctcctgtccccacactcccaggagaaactcccggtgtgtttctgaccctttcagccccattaaagctcctgagctctcaaaaaaaaaaaaaaaaaaaaaa

SEQ ID NO: 253 - DNA, 1401 bp, Homo sapiens
ggctgggactggctgagcctggcgggaggcggggtccgagtcaccgcctgccgccgcgcccccggtttctataaattgagcccgcagcctcccgcttcgctctctgctcctcctgttcgacagtcagccgcatcttcttttgcgtcgccagccgagccacatcgctcagacaccatggggaaggtgaaggtcggagtcaacggatttggtcgtattgggcgcctggtcaccagggctgcttttaactctggtaaagtggatattgttgccatcaatgaccccttcattgacctcaactacatggtttacatgttccaatatgattccacccatggcaaattccatggcaccgtcaaggctgagaacgggaagcttgtcatcaatggaaatcccatcaccatcttccaggagcgagatccctccaaaatcaagtggggcgatgctggcgctgagtacgtcgtggagtccactggcgtcttcaccaccatggagaaggctggggctcatttgcaggggggagccaaaagggtcatcatctctgccccctctgctgatgcccccatgttcgtcatgggtgtgaaccatgagaagtatgacaacagcctcaagatcatcagcaatgcctcctgcaccaccaactgcttagcacccctggccaaggtcatccatgacaactttggtatcgtggaaggactcatgaccacagtccatgccatcactgccacccagaagactgtggatggcccctccgggaaactgtggcgtgatggccgcggggctctccagaacatcatccctgcctctactggcgctgccaaggctgtgggcaaggtcatccctgagctgaacgggaagctcactggcatggccttccgtgtccccactgccaacgtgtcagtggtggacctgacctgccgtctagaaaaacctgccaaatatgatgacatcaagaaggtggtgaagcaggcgtcggagggccccctcaagggcatcctgggctacactgagcaccaggtggtctcctctgacttcaacagcgacacccactcctccacctttgacgctggggctggcattgccctcaacgaccactttgtcaagctcatttcctggtatgacaacgaatttggctacagcaacagggtggtggacctcatggcccacatggcctccaaggagtaagacccctggaccaccagccccagcaagagcacaagaggaagagagagaccctcactgctggggagtccctgccacactcagtcccccaccacactgaatctcccctcctcacagttgccatgtagaccccttgaagaggggaggggcctagggagccgcaccttgtcatgtaccatcaataaagtaccctgtgctcaaccaaaaaaaaaaaaaaaaaaa

SEQ ID NO: 254 - DNA, 5822 bp, Homo sapiens
actttttgtttttaaaacagcagcgcggctctcagggatgactctgtgagactgggaggatcatagctgggggaggctgagcgtgggagcggtgctgccagtcctgcctgaaaacgcgaaatgagtcttgcttggttctccctccactgggcgtgagagcccctgcccaggaggcccaggacaaatggccccatagtggaaactgggaagcttttaggcatctgatcagagcgggagccagccgggggaccacagtgctggacaggccaaccaactcaaacttgaagacatgaaatccccaaggagaaccactttgtgcctcatgtttattgtgatttattcttccaaagctgcactgaactggaattacgagtctactattcatcctttgagtcttcatgaacatgaaccagctggtgaagaggcactgaggcaaaaacgagccgttgccacaaaaagtcctacggctgaagaatacactgttaatattgagatcagttttgaaaatgcatccttcctggatcctatcaaagcctacttgaacagcctcagttttccaattcatgggaataacactgaccaaattaccgacattttgagcataaatgtgacaacagtctgcagacctgctggaaatgaaatctggtgctcctgcgagacaggttatgggtggcctcgggaaaggtgtcttcacaatctcatttgtcaagagcgtgacgtcttcctcccagggcaccattgcagttgccttaaagaactgcctcccaatggacctttttgcctgcttcaggaagatgttaccctgaacatgagagtcagactaaatgtaggctttcaagaagacctcatgaacacttcctccgccctctataggtcctacaagaccgacttggaaacagcgttccggaagggttacggaattttaccaggcttcaagggcgtgactgtgacagggttcaagtctggaagtgtggttgtgacatatgaagtcaagactacaccaccatcacttgagttaatacataaagccaatgaacaagttgtacagagcctcaatcagacctacaaaatggactacaactcctttcaagcagttactatcaatgaaagcaatttctttgtcacaccagaaatcatctttgaaggggacacagtcagtctggtgtgtgaaaaggaagttttgtcctccaatgtgtcttggcgctatgaagaacagcagttggaaatccagaacagcagcagattctcgatttacaccgcacttttcaacaacatgacttcggtgtccaagctcaccatccacaacatcactccaggtgatgcaggtgaatatgtttgcaaactgatattagacatttttgaatatgagtgcaagaagaaaatagatgttatgcccatccaaattttggcaaatgaagaaatgaaggtgatgtgcgacaacaatcctgtatctttgaactgctgcagtcagggtaatgttaattggagcaaagtagaatggaagcaggaaggaaaaataaatattccaggaacccctgagacagacatagattctagctgcagcagatacaccctcaaggctgatggaacccagtgcccaagcgggtcgtctggaacaacagtcatctacacttgtgagttcatcagtgcctatggagccagaggcagtgcaaacataaaagtgacattcatctctgtggccaatctaacaataaccccggacccaatttctgtttctgagggacaaaacttttctataaaatgcatcagtgatgtgagtaactatgatgaggtttattggaacacttctgctggaattaaaatataccaaagattttataccacgaggaggtatcttgatggagcagaatcagtactgacagtcaagacctcgaccagggagtggaatggaacctatcactgcatatttagatataagaattcatacagtattgcaaccaaagacgtcattgttcacccgctgcctctaaagctgaacatcatggttgatcctttggaagctactgtttcatgcagtggttcccatcacatcaagtgctgcatagaggaggatggagactacaaagttactttccatacgggttcctcatcccttcctgctgcaaaagaagttaacaaaaaacaagtgtgctacaaacacaatttcaatgcaagctcagtttcctggtgttcaaaaactgttgatgtgtgttgtcactttaccaatgctgctaataattcagtctggagcccatctatgaagctgaatctggttcctggggaaaacatcacatgccaggatcccgtaataggtgtcggagagccggggaaagtcatccagaagctatgccggttctcaaacgttcccagcagccctgagagtcccattggcgggaccatcacttacaaatgtgtaggctcccagtgggaggagaagagaaatgactgcatctctgccccaataaacagtctgctccagatggctaaggctttgatcaagagcccctctcaggatgagatgctccctacatacctgaaggatctttctattagcatagacaaagcggaacatgaaatcagctcttctcctgggagtctgggagccattattaacatccttgatctgctctcaacagttccaacccaagtaaattcagaaatgatgacgcacgtgctctctacggttaatgtcatccttggcaagcccgtcttgaacacctggaaggttttacaacagcaatggaccaatcagagttcacagctactacattcagtggaaagattttcccaagcattacagtcgggagatagccctcctttgtccttctcccaaactaatgtgcagatgagcagcatggtaatcaagtccagccacccagaaacctatcaacagaggtttgttttcccatactttgacctctggggcaatgtggtcattgacaagagctatctagaaaacttgcagtcggattcgtctattgtcaccatggctttcccaactctccaagccatccttgcccaggatatccaggaaaataactttgcagagagcttagtgatgacaaccactgtcagccacaatacaactatgccattcaggatttcaatgacttttaagaacaatagcccttcaggcggcgaaacgaagtgtgtcttctggaacttcaggcttgccaacaacacaggggggtgggacagcagtgggtgctatgtagaagaaggtgatggggacaatgtcacctgtatctgtgaccacctaacatcattctccatcctcatgtcccctgactccccagatcctagttctctcctgggaatactcctggatattatttcttatgttggggtgggcttttccatcttgagcttggcagcctgtctagttgtggaagctgtggtgtggaaatcggtgaccaagaaccggacttcttatatgcgccacacctgcatagtgaatatcgctgcctcccttctggtcgccaacacctggttcattgtggtcgctgccatccaggacaatcgctacatactctgcaagacagcctgtgtggctgccaccttcttcatccacttcttctacctcagcgtcttcttctggatgctgacactgggcctcatgctgttctatcgcctggttttcattctgcatgaaacaagcaggtccactcagaaagccattgccttctgtcttggctatggctgcccacttgccatctcggtcatcacgctgggagccacccagccccgggaagtctatacgaggaagaatgtctgttggctcaactgggaggacaccaaggccctgctggctttcgccatcccagcactgatcattgtggtggtgaacataaccatcactattgtggtcatcaccaagatcctgaggccttccattggagacaagccatgcaagcaggagaagagcagcctgtttcagatcagcaagagcattggggtcctcacaccactcttgggcctcacttggggttttggtctcaccactgtgttcccagggaccaaccttgtgttccatatcatatttgccatcctcaatgtcttccagggattattcattttactctttggatgcctctgggatctgaaggtacaggaagctttgctgaataagttttcattgtcgagatggtcttcacagcactcaaagtcaacatccctgggttcatccacacctgtgttttctatgagttctccaatatcaaggagatttaacaatttgtttggtaaaacaggaacgtataatgtttccaccccagaagcaaccagctcatccctggaaaactcatccagtgcttcttcgttgctcaactaagaacaggataatccaacctacgtgacctcccggggacagtggctgtgcttttaaaaagagatgcttgcaaagcaatggggaacgtgttctcggggcaggtttccgggagcagatgccaaaaagactttttcatagagaagaggctttcttttgtaaagacagaataaaaataattgttatgtttctgtttgttccctccccctcccccttgtgtgataccacatgtgtatagtatttaagtgaaactcaagccctcaaggcccaacttctctgtctatattgtaatatagaatttcgaagagacattttcactttttacacattgggcacaaagataagctttgattaaagtagtaagtaaaaggctacctaggaaatacttcagtgaattctaagaaggaaggaaggaagaaaggaaggaaagaagggagggaaacagggagaaagggaaaaagaagaaaaagagaaagatgaaaataggaacaaataaagacaaacaacattaagggccatattgtaagatttccatgttaatgatctaatataatcactcagtgcaacattgagaatttttttttaatggctcaaaaatggaaactgaaagcaagtcatggggaatgaatactttgggcagtatcttcctgatgtcttcttagctaagaggaggaaaaaaaggctgaaaaaatagggaggaaattccttcatcagaacgacttcaagtggataacaatatttataagaaatgaatggaaggaaatatgatcctcctgagactaactttgtatgttaaggtttgaactaagtgaatgtatctgcagaggaagtattacaaagatatgtcattagatccaagtgctgattaaatttttatagtttatcagaaaagccttatattttagtttgttccacattttgaaagcaaaaaatatatatttgatatacccttcaattgccaaatttgatatgttgcactgaagacagaccctgtcatatatttaatggcttcaagcaggtacttctctgtgcattatagaatagattttaataatcttatagcattgtatattattattgctgttgtcactgttattattattgtggatactggcccttggtgtgttgcatagctccctatgtattctctgtttccatctttaagttcccagaccaatatacattaagagttttgcatggtctaaattgtgtttattccaaccacgtggaaagctcctggaaagaaattttacattcggttgttctgtgctcctaatgacacttgaccttgttgaacaaatggcagagcctttcccaaggatttgattgtttgtgaattatctgcatgtgtgcttttttttggtgtgtatttcattaaaaaatataaatatttatgaaaattgcacgcatattagagttaaccatgtactattgatacagcaacgctacattgcaaataaaagtccgatcccaaaaggagaatgagacaaaaaaaaaa

SEQ ID NO: 255 - DNA, 2681 bp, Homo sapiens
aaaggtatctgttaagctaggtaggaactgcagtcggctggttgcttctcatctggagaaagcaggcaactgggcagtgattgaagtgtccagcagggggctggcattctctgtctataagtaacactggttcctcttcagagcctcagctcagcggagctgccgtttgctggtgaagcccgtgacgtgcaaagcatcctgcctataggatttgaggatttctcagtgcagtttttttctacccactttaaacctccagattctaaatatcaggaaagacgctgtgggaaaatagcaggccaaaagttcttagtaaactgcagccagggagactcagactagaatggaggtagaaagaactgatgcagagtgggtttaattctaagcctttttgtggctaagttttgttgttgttaacttattgaatttagagttgtattgcactggtcatgtgaaagccagagcagcaccagtgtcaaaatagtgacagagagttttgaataccatagttagtatatatgtactcagagtatttttattaaagaaggcaaagagcccggcatagatcttatcttcatcttcactcggttgcaaaatcaatagttaagaaatagcatctaagggaacttttaggtgggaaaaaaaatctagagatggctctaaatgactgtttccttctgaacttggaggtggaccatttcatgcactgcaacatctccagtcacagtgcggatctccccgtgaacgatgactggtcccacccggggatcctctatgtcatccctgcagtttatggggttatcattctgataggcctcattggcaacatcactttgatcaagatcttctgtacagtcaagtccatgcgaaacgttccaaacctgttcatttccagtctggctttgggagacctgctcctcctaataacgtgtgctccagtggatgccagcaggtacctggctgacagatggctatttggcaggattggctgcaaactgatcccctttatacagcttacctctgttggggtgtctgtcttcacactcacggcgctctcggcagacagatacaaagccattgtccggccaatggatatccaggcctctcatgccctgatgaagatctgcctcaaagccgcctttatctggatcatctccatgctgctggccattccagaggccgtgttttctgacctccatcccttccatgaggaaagcaccaaccagaccttcattagctgtgccccatacccacactctaatgagcttcaccccaaaatccattctatggcttcctttctggtcttctacgtcattccactgtcgatcatctctgtttactactacttcattgctaaaaatctgatccagagtgcttacaatcttcccgtggaagggaatatacatgtcaagaagcagattgaatcccggaagcgacttgccaagacagtgctggtgtttgtgggcctgttcgccttctgctggctccccaatcatgtcatctacctgtaccgctcctaccactactctgaggtggacacctccatgctccactttgtcaccagcatctgtgcccgcctcctggccttcaccaactcctgcgtgaacccctttgccctctacctgctgagcaagagtttcaggaaacagttcaacactcagctgctctgttgccagcctggcctgatcatccggtctcacagcactggaaggagtacaacctgcatgacctccctcaagagtaccaacccctccgtggccacctttagcctcatcaatggaaacatctgtcacgagcggtatgtctagattgacccttgattttgccccctgagggacggttttgctttatggctagacaggaacccttgcatccattgttgtgtctgtgccctccaaagagccttcagaatgctcctgagtggtgtaggtgggggtggggaggcccaaatgatggatcaccattatattttgaaagaagccatcaagtcttaagtttttcatttcaacttgtgaacgtttcttctgatgtgaagcaaaccttcccttttcagaaaagggaacaagtagaaaattattttttaagcctcaagccctgttaaatggtcgtggccaattatgtcatagaaactgtatgaacaaccagatttacatagcagagaaatcatacattgaatgcttactttgtgaaagacttcaccttgtcatttctttaagcagacgctagtactttagaaatataacttgactctgttttcaggaatatctgtaatacacaaaccaaggaacaacttttatttacactcctaatatgaaaagtcaatcctgtgagagagctccatgtatgagggacactctccaagttgataacaatggaagcgagtttaatataaaacaattccctaagcatttattttttttttaaaaagatgttactgaggacctagaagaaatgctcaatacatactttgaaagcaaaaatacaatcaaacacattgacacgtatataaagatccacgcgtggctgtgcgtgatatctcacactctgaattcttacttgatggaggttttgtttgctgctacggttttaatcatccagggtgccattccaccatagaagagcaatccttttaggaaaaaaaaaatcatgctattaattaatcaaatatctataaatgcata

SEQ ID NO: 256 - DNA, 3047 bp, Homo sapiens
tcttgcgtcaagacggccgtgctgagcgaatgcaggcgacttgcgagctgggagcgatttaaaacgctttggattcccccggcctgggtggggagagcgagctgggtgccccctagattccccgcccccgcacctcatgagccgaccctcggctccatggagcccggcaattatgccaccttggatggagccaaggatatcgaaggcttgctgggagcgggaggggggcggaatctggtcgcccactcccctctgaccagccacccagcggcgcctacgctgatgcctgctgtcaactatgcccccttggatctgccaggctcggcggagccgccaaagcaatgccacccatgccctggggtgccccaggggacgtccccagctcccgtgccttatggttactttggaggcgggtactactcctgccgagtgtcccggagctcgctgaaaccctgtgcccaggcagccaccctggccgcgtaccccgcggagactcccacggccggggaagagtaccccagccgccccactgagtttgccttctatccgggatatccgggaacctaccagcctatggccagttacctggacgtgtctgtggtgcagactctgggtgctcctggagaaccgcgacatgactccctgttgcctgtggacagttaccagtcttgggctctcgctggtggctggaacagccagatgtgttgccagggagaacagaacccaccaggtcccttttggaaggcagcatttgcagactccagcgggcagcaccctcctgacgcctgcgcctttcgtcgcggccgcaagaaacgcattccgtacagcaaggggcagttgcgggagctggagcgggagtatgcggctaacaagttcatcaccaaggacaagaggcgcaagatctcggcagccaccagcctctcggagcgccagattaccatctggtttcagaaccgccgggtcaaagagaagaaggttctcgccaaggtgaagaacagcgctaccccttaagagatctccttgcctgggtgggaggagcgaaagtgggggtgtcctggggagaccaggaacctgccaagcccaggctggggccaaggactctgctgagaggcccctagagacaacacccttcccaggccactggctgctggactgttcctcaggagcggcctgggtacccagtatgtgcagggagacggaaccccatgtgacagcccactccaccagggttcccaaagaacctggcccagtcataatcattcatcctgacagtggcaataatcacgataaccagtactagctgccatgatcgttagcctcatattttctatctagagctctgtagagcactttagaaaccgctttcatgaattgagctaattatgaataaatttggaaggcgatccctttgcagggaagctttctctcagacccccttccattacacctctcaccctggtaacagcaggaagactgaggagaggggaacgggcagattcgttgtgtggctgtgatgtccgtttagcatttttctcagctgacagctgggtaggtggacaattgtagaggctgtctcttcctccctccttgtccaccccatagggtgtacccactggtcttggaagcacccatccttaatacgatgatttttctgtcgtgtgaaaatgaagccagcaggctgcccctagtcagtccttccttccagagaaaaagagatttgagaaagtgcctgggtaattcaccattaatttcctcccccaaactctctgagtcttcccttaatatttctggtggttctgaccaaagcaggtcatggtttgttgagcatttgggatcccagtgaagtagatgtttgtagccttgcatacttagcccttcccaggcacaaacggagtggcagagtggtgccaaccctgttttcccagtccacgtagacagattcacagtgcggaattctggaagctggagacagacgggctctttgcagagccgggactctgagagggacatgagggcctctgcctctgtgttcattctctgatgtcctgtacctgggctcagtgcccggtgggactcatctcctggccgcgcagcaaagccagcgggttcgtgctggtccttcctgcaccttaggctgggggtggggggcctgccggcgcattctccacgattgagcgcacaggcctgaagtctggacaacccgcagaaccgaagctccgagcagcgggtcggtggcgagtagtggggtcggtggcgagcagttggtggtgggccgcggccgccactacctcgaggacatttccctcccggagccagctctcctagaaaccccgcggcggccgccgcagccaagtgtttatggcccgcggtcgggtgggatcctagccctgtctcctctcctgggaaggagtgagggtgggacgtgacttagacacctacaaatctatttaccaaagaggagcccgggactgagggaaaaggccaaagagtgtgagtgcatgcggactgggggttcaggggaagaggacgaggaggaggaagatgaggtcgatttcctgatttaaaaaatcgtccaagccccgtggtccagcttaaggtcctcggttacatgcgccgctcagagcaggtcactttctgccttccacgtcctccttcaaggaagccccatgtgggtagctttcaatatcgcaggttcttactcctctgcctctataagctcaaacccaccaacgatcgggcaagtaaaccccctccctcgccgacttcggaactggcgagagttcagcgcagatgggcctgtggggagggggcaagatagatgagggggagcggcatggtgcggggtgaccccttggagagaggaaaaaggccacaagaggggctgccaccgccactaacggagatggccctggtagagacctttgggggtctggaacctctggactccccatgctctaactcccacactctgctatcagaaacttaaacttgaggattttctctgtttttcactcgcaataaattcagagcaaacaaaaaaaaaaaaa

SEQ ID NO: 257 - DNA, 4617 bp, Homo sapiens
atctaagcttctctgtcttcctccctccctcccttcctcttactctcattcatttcatacacactggctcacacatctactctctctctctatctctctcagaatgacaattctaggtacaacttttggcatggttttttctttacttcaagtcgtttctggagaaagtggctatgctcaaaatggagacttggaagatgcagaactggatgactactcattctcatgctatagccagttggaagtgaatggatcgcagcactcactgacctgtgcttttgaggacccagatgtcaacatcaccaatctggaatttgaaatatgtggggccctcgtggaggtaaagtgcctgaatttcaggaaactacaagagatatatttcatcgagacaaagaaattcttactgattggaaagagcaatatatgtgtgaaggttggagaaaagagtctaacctgcaaaaaaatagacctaaccactatagttaaacctgaggctccttttgacctgagtgtcgtctatcgggaaggagccaatgactttgtggtgacatttaatacatcacacttgcaaaagaagtatgtaaaagttttaatgcacgatgtagcttaccgccaggaaaaggatgaaaacaaatggacgcatgtgaatttatccagcacaaagctgacactcctgcagagaaagctccaaccggcagcaatgtatgagattaaagttcgatccatccctgatcactattttaaaggcttctggagtgaatggagtccaagttattacttcagaactccagagatcaataatagctcaggggagatggatcctatcttactaaccatcagcattttgagttttttctctgtcgctctgttggtcatcttggcctgtgtgttatggaaaaaaaggattaagcctatcgtatggcccagtctccccgatcataagaagactctggaacatctttgtaagaaaccaagaaaaaatttaaatgtgagtttcaatcctgaaagtttcctggactgccagattcatagggtggatgacattcaagctagagatgaagtggaaggttttctgcaagatacgtttcctcagcaactagaagaatctgagaagcagaggcttggaggggatgtgcagagccccaactgcccatctgaggatgtagtcatcactccagaaagctttggaagagattcatccctcacatgcctggctgggaatgtcagtgcatgtgacgcccctattctctcctcttccaggtccctagactgcagggagagtggcaagaatgggcctcatgtgtaccaggacctcctgcttagccttgggactacaaacagcacgctgccccctccattttctctccaatctggaatcctgacattgaacccagttgctcagggtcagcccattcttacttccctgggatcaaatcaagaagaagcatatgtcaccatgtccagcttctaccaaaaccagtgaagtgtaagaaacccagactgaacttaccgtgagcgacaaagatgatttaaaagggaagtctagagttcctagtctccctcacagcacagagaagacaaaattagcaaaaccccactacacagtctgcaagattctgaaacattgctttgaccactcttcctgagttcagtggcactcaacatgagtcaagagcatcctgcttctaccatgtggatttggtcacaaggtttaaggtgacccaatgattcagctatttaaaaaaaaaagaggaaagaatgaaagagtaaaggaaatgattgaggagtgaggaaggcaggaagagagcatgagaggaaagaaagaaaggaaaataaaaaatgatagttgccattattaggatttaatatatatccagtgctttgcaagtgctctgcgcaccttgtctcactccatcctgacaataatcctgggaggtgtgtgcaattactacgactactctcttttttatagatcattaaattcagaactaaggagttaagtaacttgtccaagttgttcacacagtgaagggaggggccaagatatgatggctgggagtctaattgcagttccctgagccatgtgcctttctcttcactgaggactgccccattcttgagtgccaaacgtcactagtaacagggtgtgcctagataatttatgatccaaactgagtcagtttggaaagtgaaagggaaacttacatataatccctccgggacaatgagcaaaaactaggactgtccccagacaaatgtgaacatacatatcatcacttaaattaaaatggctatgagaaagaaagagggggagaaacagtcttgcgggtgtgaagtcccatgaccagccatgtcaaaagaaggtaaagaagtcaagaaaaagccatgaagcccatttggtttcatttttctgaaaataggctcaagagggaataaattagaaactcacaatttctcttgtttgttaccaagacagtgattctcttgctgctaccacccaactgcatccgtccatgatctcagaggaaactgtcgctgaccctggacatgggtacgtttgacgagtgagaggaggcatgacccctcccatgtgtatagacactaccccaacctaaattcatccctaaattgtcccaagttctccagcaatagaggctgccacaaacttcagggagaaagagttacaagtacatgcaatgagtgaactgactgtggctacaatcttgaagatatacggaagagacgtattattaatgcttgacatatatcatcttgcctttcttggtctagactgacttctaatgactaactcaaagtcaaggcaactgagtaatgtcagctcagcaaagtgcagcaaacccatctcccacaggcctccaaaccctggctgttcacagaaccacaaagggcagatgctgcacagaaaactagagaaggggtcataggttcatggttttgtttgagatttgttgctactgtttttctgttttgaattttcttctttgttctgtttttactttatttagggggactaggtgtttctgatattttagttttcttgtttgttttgttttgtgttgtctgtgaatggggttttaactgtggatgaatggaccttatctgttggcttaaaggactggtaagatcagaccatcttattcttcaggtgaatgttttactttccaaagtgctctcctctgcaccagcagtaataaatacaatgccataatcccttaggtttgcctagtgcttttgcaattttcaaagcacttccataagcattccttccacctccttgataggcatttatggaaagcctgctacatgtcaatcatactgttaggcacaggggacctaaagacacataaaaggatggcattctgcctcataaattgcaaaacctaatgaaagtgactgcttggtaaacaaattattattatattataaaatgctataaaagagccatattgaaagtgccctgttggagacagggcaaatgccacaaaaatgatgtaaatttacatggaggaaaagtagaatctgcctggtttgtaggcagcagaagacatttttcatcagtgggcaggtgttctttaccttttgtagaaatgggagtcaagtctcaaataggaggctccacaaaatctcatgccaggtctctgataccttattcacagaagttctttgaagtatttattgttattttctttgacttatgggaaaactgggacacaggaagacaggtaaattacccaacctcacacgttaagtcagaactgggagccataattttgtatccctggtataaatagacaatctcttgaagaaatgaagagatgaccatagaaaaacatcgagatatctccagctctaaaatcctttgtttcaatgttgtttggcatatgttatctttggaatttagtgtctgagcctctgtctgttactgtagtatttaaaatgcatgtattataatcatataatcataactgctgttaattcttgattatatacctagggacaatgtgtaatgtaagattactaattggttctgcccaatctcctttcagattttattaggaaaaaaaaataaacctcctgatcggagacaatgtattaatcagaagtgtaaactgccagttctatatagcatgaaatgaaaagacagctaatttggtccaacaaacatgactgggtctagggcacccaggctgattcagctgatttcctaccagcctttgcctcttccttcaatgtggtttccatgggaatttgcttcagaaaagccaagtatgggctgttcagaggtgcacacctgcattttcttagctcttctagaggggctaagagacttggtacgggccaggaagaatatgtggcagagctcctggaaatgatgcagattaggtggcatttttgtcagctctgtggtttattgttgggactattctttaaaatatccattgttcactacagtgaagatctctgatttaaccgtgtactatccacatgcattacaaacatttcgcagagctgcttagtatataagcgtacaatgtatgtaataaccatctcatatttaattaaatggtatagaagaacaaaaaaaaaaaaaaaaaa

SEQ ID NO: 258 - DNA, 3407 bp, Homo sapiens
actctttcctgagccctgtgcttcggatggcggcgggaggttgatggcgagtggtgctgaagggacagctccagcagtggctgatttgggggagaaacaaaatctgcagatggaatccgagcagggcgacttcaccttcaagtggtgagctctcctgacctgcggccagtctccactccattcacggccagccgatctgcccgctcccggaggggtcgggcagtgccggctggacccgccccgagctccatggtttgcccaaccctgcgcgatggtgactctgggcgcggaggttggcgactggcaaatccgcagatcacagaatgaaggcggggagcgcggccggcggccggcgggggctttctcccccaccccagcgcccagggaagcggctcaaccacctgaatccggaaaacgccaacaagtagtttctcgtcggagaagggcggctcacctgggcgccaagactcagtcccgctgcccagagaacctcgtccactcggaaaccaaagcagaaccacttttctctcggtctcgttaagtcatgtctgagtcacagagatgggcaagatcgagaacaacgagagggtgatcctcaatgtcgggggcacccggcacgaaacctaccgcagcaccctcaagaccctgcctggaacacgcctggcccttcttgcctcctccgagcccccaggcgactgcttgaccacggcgggcgacaagctgcagccgtcgccgcctccactgtcgccgccgccgagagcgcccccgctgtcccccgggccaggcggctgcttcgagggcggcgcgggcaactgcagttcccgcggcggcagggccagcgaccatcccggtggcggccgcgagttcttcttcgaccggcacccgggcgtcttcgcctatgtgctcaattactaccgcaccggcaagctgcactgccccgcagacgtgtgcgggccgctcttcgaggaggagctggccttctggggcatcgacgagaccgacgtggagccctgctgctggatgacctaccggcagcaccgcgacgccgaggaggcgctggacatcttcgagacccccgacctcattggcggcgaccccggcgacgacgaggacctggcggccaagaggctgggcatcgaggacgcggcggggctcgggggccccgacggcaaatctggccgctggaggaggctgcagccccgcatgtgggccctcttcgaagacccctactcgtccagagccgccaggtttattgcttttgcttctttattcttcatcctggtttcaattacaactttttgcctggaaacacatgaagctttcaatattgttaaaaacaagacagaaccagtcatcaatggcacaagtgttgttctacagtatgaaattgaaacggatcctgccttgacgtatgtagaaggagtgtgtgtggtgtggtttacttttgaatttttagtccgtattgttttttcacccaataaacttgaattcatcaaaaatctcttgaatatcattgactttgtggccatcctacctttctacttagaggtgggactcagtgggctgtcatccaaagctgctaaagatgtgcttggcttcctcagggtggtaaggtttgtgaggatcctgagaattttcaagctcacccgccattttgtaggtctgagggtgcttggacatactcttcgagctagtactaatgaatttttgctgctgataattttcctggctctaggagttttgatatttgctaccatgatctactatgccgagagagtgggagctcaacctaacgacccttcagctagtgagcacacacagttcaaaaacattcccattgggttctggtgggctgtagtgaccatgactaccctgggttatggggatatgtacccccaaacatggtcaggcatgctggtgggagccctgtgtgctctggctggagtgctgacaatagccatgccagtgcctgtcattgtcaataattttggaatgtactactccttggcaatggcaaagcagaaacttccaaggaaaagaaagaagcacatccctcctgctcctcaggcaagctcacctactttttgcaagacagaattaaatatggcctgcaatagtacacagagtgacacatgtctgggcaaagacaatcgacttctggaacataacagatcagataactgcaaagaggttgtcattactggttacacgcaagccgaggccagatctcttacttaatgacttggggaaggcacaaaacatgagagaaagtgttgtacagaatttatcatggattattgactgctgagaaagggacagtggaatttagccataccaaggactatactggaaacagacttctgctgctgaatgtgccctgatgtgaccaggttgcacttggaagagatcctcgcgtcttcatgaggcacttaaagcttataaaagaactgcggctggaactcatctggtgctccccatgagagtgctctgcttgtagactggccagtgtccatgaaacaactgtaaataccaacatgtgtgcatgggtcaacagtcttggccatttctcatcaaaagaagccaaattcatgatcaacatctctgaagtttcaagtaaggcccacacttctttgaattactcttcatgggcccacattaggttgtgctgtgaattacttaaggcagtgatactgatgtagtatagttttgtcttaatttcccttatttctacttctttggttgaatctatgaacttgattgtataattttcttataaattactgatgtaatcagcttgtcaattatgttgtgaaattgttagtattcatttatcaaaaatgacctatgtttagtcacatatttgtttagttctgggaaattgttatagcttaaatggaactcaccaacattattcatagtttaagtcttttatcattattacctcaattataaatattacaaaaacataattctggcaatgagagtatttttttattcaatgatcaaggagcaatgtcagtatatagtagaatatcaattaaattatatcctaaaatgtatattttgcataaaagagatattctttaatcaattacttttttgtgagttttgtggcaaatgaagcttgtacgtgtctttaaaactgttgtagatgaaactgtataagatttttacatcttgcttaatcaatattttcagagtctattagttcccctgggattctgaatataacatatagcctattataaatccctgtatcgtggaccttttgtgaacatttcaaggcgcatgcacaaccttgatgataaccagtggaaatgtaactaactgaaatgaagaataaaaggcaaatgagctggggataaacttgaatgttatctgattaaattactcaaattataaaaaaa

SEQ ID NO: 259 - DNA, 2095 bp, Homo sapiens
gcggccgccggagcccgagctgacgccgccttggcacccctcctggagttagaaactaaggccggggcccgcggcgctcggcgcgcaggccgcccggcttcctgcgtccatttccgcgtgctttcaaagaagacagagagaggcactgggttgggcttcatttttttcctccccatccccagtttctttctctttttaaaaataataattatcccaataattaaagccaattcccccctcccctcccccagtccctccccccaactcccccctcccccgcccgccggggcaggggagcgccacgaattgaccaagtgaagctacaactttgcgacataaattttggggtctcgaaccatgtcgctgaccaacacaaagacggggttttcggtcaaggacatcttagacctgccggacaccaacgatgaggagggctctgtggccgaaggtccggaggaagagaacgaggggcccgagccagccaagagggccgggccgctggggcagggcgccctggacgcggtgcagagcctgcccctgaagaaccccttctacgacagcagcgacaacccgtacacgcgctggctggccagcaccgagggccttcagtactccctgcacggtctggctgccggggcgccccctcaggactcaagctccaagtccccggagccctcggccgacgagtcaccggacaatgacaaggagaccccgggcggcgggggggacgccggcaagaagcgaaagcggcgagtgcttttctccaaggcgcagacctacgagctggagcggcgctttcggcagcagcggtacctgtcggcgcccgagcgcgaacacctggccagcctcatccgcctcacgcccacgcaggtcaagatctggttccagaaccaccgctacaagatgaagcgcgcccgggccgagaaaggtatggaggtgacgcccctgccctcgccgcgccgggtggccgtgcccgtcttggtcagggacggcaaaccatgtcacgcgctcaaagcccaggacctggcagccgccaccttccaggcgggcattcccttttctgcctacagcgcgcagtcgctgcagcacatgcagtacaacgcccagtacagctcggccagcaccccccagtacccgacagcacaccccctggtccaggcccagcagtggacttggtgagcgccgccccaacgagactcgcggccccaggcccaggccccaccccggcggcggtggcggcgaggaggcctcggtccttatggtggttattattattattataattattattatggagtcgagttgactctcggctccactagggaggcgccgggaggttgcctgcgtctccttggagtggcagattccacccacccagctctgcccatgcctctccttctgaaccttgggagagggctgaactctacgccgtgtttacagaatgtttgcgcagcttcgcttctttgcctctccccggggggaccaaaccgtcccagcgttaatgtcgtcacttgaaaacgagaaaaagaccgaccccccacccctgctttcgtgcattttgtaaaatatgtttgtgtgagtagcgatattgtcagccgtcttctaaagcaagtggagaacactttaaaaatacagagaatttcttcctttttttaaaaaaaaataagaaaatgctaaatatttatggccatgtaaacgttctgacaactggtggcagatttcgcttttcgttgtaaatatcggtggtgattgttgccaaaatgaccttcaggaccggcctgtttcccgtctgggtccaactcctttctttgtggcttgtttgggtttgttttttgttttgtttttgtttttgcgttttcccctgctttcttcctttctctttttattttattgtgcaaacatttctcaaatatggaaaagaaaaccctgtaggcagggagccctctgccctgtcctccgggccttcagccccgaacttggagctcagctattcggcgcggttccccaacagcgccgggcgcagaaagctttcgattttttaaataagaattttaataaaaatcctgtgtttaaaaaagaaaaaaaaaaaaaaaaa

SEQ ID NO: 260 - DNA, 2926 bp, Homo sapiens
ccgggttctctcccggcgtgccccgcgccgggtttgttggggggtactcggcagtgcagccatgactatactccccaaaaagaagccgccgcctcccgacgccgaccccgccaacgagccgccgccgcccgggccgatgcccccggcgccgcggcgcggcggaggtgtgggcgtgggcggcggcggcacgggcgtgggcggcggcgatcgcgaccgtgactccggcgtcgtgggggcccgtccgcgagcttcgccaccgcctcaaggcccgctaccaggaccgccgggcgctcttcatcgctgggcgctggccgtgccgcctggtgcagtggcgggtccccggccacaacaggcttctccacctccttgcgggggcccaggtggtcccggcggcggtcccggcgacgcgctgggcgcagcggcggcgggtgtgggtgccgcgggcgtggtggtgggtgtgggtggtgccgtaggcgtgggcggctgctgctccgggcctgggcacagcaagcggcgacgtcaagctcccggggttggcgcggttggcgggggcagtcccgagcgtgaggaggtcggcgcaggctacaacagtgaggacgagtatgaggcggctgcagcacgcatcgaggctatggaccctgccactgtcgagcagcaggagcattggtttgaaaaggccctacgagacaagaagggcttcatcatcaagcagatgaaggaggatggcgcctgtctcttccgggctgtagctgaccaggtgtatggagaccaggacatgcatgaggttgtgcgaaagcattgcatggactatctgatgaagaatgccgactacttctccaactatgtcacagaggactttaccacctacattaacaggaagcggaaaaacaattgccatggcaaccacattgagatgcaggccatggcagagatgtacaaccgtcctgtggaggtgtaccagtacagcacagaacccatcaacacattccatgggatacatcaaaacgaggacgaacccattcgtgttagctaccatcggaatatccactataattcagtggtgaatcctaacaaggccaccattggtgtggggctgggcctgccatcattcaaaccagggtttgcagagcagtctctgatgaagaatgccataaaaacatcggaggagtcatggattgaacagcagatgctagaagacaagaaacgggccacagactgggaggccacaaatgaagccatcgaggagcaggtggctcgggaatcctacctgcagtggttgcgggatcaggagaaacaggctcgccaggtccgaggccccagccagccccggaaagccagcgccacatgcagttcggccacagcagcagcctccagtggcctggaggagtggactagccggtccccgcggcagcggagttcagcctcgtcacctgagcaccctgagctgcatgctgaattgggcatgaagcccccttccccaggcactgttttagctcttgccaaacctccttcgccctgtgcgccaggtacaagcagtcagttctcggcaggggccgaccgggcaacttccccccttgtgtccctctaccctgctttggagtgccgggccctcattcagcagatgtccccctctgcctttggtctgaatgactgggatgatgatgagatcctagcttcggtgctggcagtgtcccaacaggaatacctagacagtatgaagaaaaacaaagtgcacagagacccgcccccagacaagagttgatggagacccagggattggacaccatctcccaaccccagtactcctgctctccggtgccacctcaccttctttggcttcttccctcttgcctccttctgttctttctgctctcccctcttttccctcctcctcacttccctctggctagcccacccctgcactctctctcattgccgctgccactatcacctgtctctctgccagctgatgtgccctgttgccccccaccccatcccgcacagaaccatccctgcattccacaggggactcgggcaagggtgccgaagatagacaagaggcacacagagacagaccaactggcagccaggcagccccagaggagagagacattcagacagaggaaagtctccctgcccctcattccttccaagatgagaaaaacttgccgccaccccccgacactgatgccagggaggtgggaggaagaagtgggaaatttcccttcccagtacccccaagaacgtctgagccttcaatgttgaattttttctttattaaaattacttttatcttataaaatcaactaatcaaaaatgatatagacgacagcactggctctgtgaaggtggcatctttctgggcaggcaggccatggggcatggaggagggtgcaaagatatgggttgctgtcttctggcctccagctgcatggaggccggcccagggtctagggtgtgcactgggcaagggcagggcggcaggtgtcaggccggcttggacaatgaaaccctgaccttgctgcattccttttgcttccaccaccactagcttctttggaatcttggggtgggggtcatctttggggattatggctgccacccgggatttgagtgtagggagtgtgggagcagccttggcagatggggcacccgtgccctgcaggtgttgacaagatccgccatctgtaatgtccttggcacaataaaaccaaatgtcagtttccctgagcgactctgttctgtgtggggcaggggttgggcgggcctctgggcagaggatgcaatggcacggaccttggcttgacctcagaggtgtgaatgctctccagcagggtctgtctgggggcctggagtttgtatttgatttgctgcttattaaacctccttctggacctattgccactggaaaaaaaaaaaaaaaaaa

SEQ ID NO: 261 - DNA, 3675 bp, Homo sapiens
ctgcagccgagggagaccaggaagatctgcatggtgggaaggacctgatgatacagaggtgagaaataagaaaggctgctgactttaccatctgaggccacacatctgctgaaatggagataattaacatcactagaaacagcaagatgacaatataatgtctaagtagtgacatgtttttgcacatttccagcccctttaaatatccacacacacaggaagcacaaaaggaagcacagagatccctgggagaaatgcccggccgccatcttgggtcatcgatgagcctcgccctgtgcctggtcccgcttgtgagggaaggacattagaaaatgaattgatgtgttccttaaaggatgggcaggaaaacagatcctgttgtggatatttatttgaacgggattacagatttgaaatgaagtcacaaagtgagcattaccaatgagaggaaaacagacgagaaaatcttgatggcttcacaagacatgcaacaaacaaaatggaatactgtgatgacatgaggcagccaagctggggaggagataaccacggggcagagggtcaggattctggccctgctgcctaaactgtgcgttcataaccaaatcatttcatatttctaaccctcaaaacaaagctgttgtaatatctgatctctacggttccttctgggcccaacattctccatatatccagccacactcatttttaatatttagttcccagatctgtactgtgacctttctacactgtagaataacattactcattttgttcaaagacccttcgtgttgctgcctaatatgtagctgactgtttttcctaaggagtgttctggcccaggggatctgtgaacaggctgggaagcatctcaagatctttccagggttatacttactagcacacagcatgatcattacggagtgaattatctaatcaacatcatcctcagtgtctttgcccatactgaaattcatttcccacttttgtgcccattctcaagacctcaaaatgtcattccattaatatcacaggattaacttttttttttaacctggaagaattcaatgttacatgcagctatgggaatttaattacatattttgttttccagtgcaaagatgactaagtcctttatccctcccctttgtttgattttttttccagtataaagttaaaatgcttagccttgtactgaggctgtatacagccacagcctctccccatccctccagccttatctgtcatcaccatcaacccctcccatgcacctaaacaaaatctaacttgtaattccttgaacatgtcaggcatacattattccttctgcctgagaagctcttccttgtctcttaaatctagaatgatgtaaagttttgaataagttgactatcttacttcatgcaaagaagggacacatatgagattcatcatcacatgagacagcaaatactaaaagtgtaatttgattataagagtttagataaatatatgaaatgcaagagccacagagggaatgtttatggggcacgtttgtaagcctgggatgtgaagcaaaggcagggaacctcatagtatcttatataatatacttcatttctctatctctatcacaatatccaacaagcttttcacagaattcatgcagtgcaaatccccaaaggtaacctttatccatttcatggtgagtgcgctttagaattttggcaaatcatactggtcacttatctcaactttgagatgtgtttgtccttgtagttaattgaaagaaatagggcactcttgtgagccactttagggttcactcctggcaataaagaatttacaaagagctactcaggaccagttgttaagagctctgtgtgtgtgtgtgtgtgtgtgagtgtacatgccaaagtgtgcctctctctctttgacccattatttcagacttaaaaacaagcatgttttcaaatggcactatgagctgccaatgatgtatcaccaccatatctcattattctccagtaaatgtgataataatgtcatctgttaacataaaaaaagtttgacttcacaaaagcagctggaaatggacaaccacaatatgcataaatctaactcctaccatcagctacacactgcttgacatatattgttagaagcacctcgcatttgtgggttctcttaagcaaaatacttgcattaggtctcagctggggctgtgcatcaggcggtttgagaaatattcaattctcagcagaagccagaatttgaattccctcatcttttaggaatcatttaccaggtttggagaggattcagacagctcaggtgctttcactaatgtctctgaacttctgtccctctttgtgttcatggatagtccaataaataatgttatctttgaactgatgctcataggagagaatataagaactctgagtgatatcaacattagggattcaaagaaatattagatttaagctcacactggtcaaaaggaaccaagatacaaagaactctgagctgtcatcgtccccatctctgtgagccacaaccaacagcaggacccaacgcatgtctgagatccttaaatcaaggaaaccagtgtcatgagttgaattctcctattatggatgctagcttctggccatctctggctctcctcttgacacatattagcttctagcctttgcttccacgacttttatcttttctccaacacatcgcttaccaatcctctctctgctctgttgctttggacttccccacaagaatttcaacgactctcaagtcttttcttccatccccaccactaacctgaatgcctagacccttatttttattaatttccaatagatgctgcctatgggctatattgctttagatgaacattagatatttaaagctcaagaggttcaaaatccaactcattatcttctctttctttcacctccctgctcctctccctatattactgattgcactgaacagcatggtccccaatgtagccatgcaaatgagaaacccagtggctccttgtggtacatgcatgcaagactgctgaagccagaaggatgactgattacgcctcatgggtggaggggaccactcctgggccttcgtgattgtcaggagcaagacctgagatgctccctgccttcagtgtcctctgcatctcccctttctaatgaagatccatagaatttgctacatttgagaattccaattaggaactcacatgttttatctgccctatcaattttttaaacttgctgaaaattaagttttttcaaaatctgtccttgtaaattactttttcttacagtgtcttggcatactatatcaactttgattctttgttacaacttttcttactcttttatcaccaaagtggcttttattctctttattattattattttcttttactactatattacgttgttattattttgttctctatagtatcaatttatttgatttagtttcaatttatttttattgctgacttttaaaataagtgattcggggggtgggagaacaggggagggagagcattaggacaaatacctaatgcatgtgggacttaaaacctagatgatgggttgataggtgcagcaaaccactatggcacacgtatacctgtgtaacaaacctacacattctgcacatgtatcccagaacgtaaag

SEQ ID NO: 262 - DNA, 2692 bp, Homo sapiens
tttaaagctgggaggttctgccaccaagcacggccttcccactgggaacacaaacttgctggcgggaagagcccggaaagaaacctgtggatctcccttcgagatcatccaaagagaagaaaggtgacctcacattcgtgccccttagcagcactctgcagaaatgcctcctcagctgcaaaacggcctgaacctctcggccaaagttgtccagggaagcctggacagcctaccccaggcagtgagggagtttctcgagaataacgctgagctgtgtcagcctgatcacatccacatctgtgacggctctgaggaggagaatgggcggcttctgggccagatggaggaagagggcatcctcaggcggctgaagaagtatgacaactgctggttggctctcactgaccccagggatgtggccaggatcgaaagcaagacggttatcgtcacccaagagcaaagagacacagtgcccatccccaaaacaggcctcagccagctcggtcgctggatgtcagaggaggattttgagaaagcgttcaatgccaggttcccagggtgcatgaaaggtcgcaccatgtacgtcatcccattcagcatggggccgctgggctcgcctctgtcaaagatcggcatcgagctgacggattcaccctacgtggtggccagcatgcggatcatgacgcggatgggcacgcccgtcctggaagcagtgggcgatggggagtttgtcaaatgcctccattctgtggggtgccctctgcctttacaaaagcctttggtcaacaactggccctgcaacccggagctgacgctcatcgcccacctgcctgaccgcagagagatcatctcctttggcagtgggtacggcgggaactcgctgctcgggaagaagtgctttgctctcaggatggccagccggctggccaaggaggaagggtggctggcagagcacatgctgattctgggtataaccaaccctgagggtgagaagaagtacctggcggccgcatttcccagcgcctgcgggaagaccaacctggccatgatgaaccccagcctccccgggtggaaggttgagtgcgtcggggatgacattgcctggatgaagtttgacgcacaaggtcatttaagggccatcaacccagaaaatggctttttcggtgtcgctcctgggacttcagtgaagaccaaccccaatgccatcaagaccatccagaagaacacaatctttaccaatgtggccgagaccagcgacgggggcgtttactgggaaggcattgatgagccgctagcttcaggtgtcaccatcacgtcctggaagaataaggagtggagctcagaggatggggaaccttgtgcccaccccaactcgaggttctgcacccctgccagccagtgccccatcattgatgctgcctgggagtctccggaaggtgttcccattgaaggcattatctttggaggccgtagacctgctggtgtccctctagtctatgaagctctcagctggcaacatggagtctttgtgggggcggccatgagatcagaggccacagcggctgcagaacataaaggcaaaatcatcatgcatgacccctttgccatgcggcccttctttggctacaacttcggcaaatacctggcccactggcttagcatggcccagcacccagcagccaaactgcccaagatcttccatgtcaactggttccggaaggacaaggaaggcaaattcctctggccaggctttggagagaactccagggtgctggagtggatgttcaaccggatcgatggaaaagccagcaccaagctcacgcccataggctacatccccaaggaggatgccctgaacctgaaaggcctggggcacatcaacatgatggagcttttcagcatctccaaggaattctgggagaaggaggtggaagacatcgagaagtatctggaggatcaagtcaatgccgacctcccctgtgaaatcgagagagagatccttgccttgaagcaaagaataagccagatgtaatcagggcctgagtgctttacctttaaaatcattccctttcccatccataaggtgcagtaggagcaagagagggcaagtgttcccaaattgacgccaccataataatcatcaccacaccgtgagcagatctgaaaggcacactttgatttttttaaggataagaaccacagaacactgggtagtagctaatgaaattgagaagggaaatcttagcatgcctccaaaaattcacatccaatgcatagtttgttcaaatttaaggttactcaggcattgatcttttcagtgttttttcactttagctatgtggattagctagaatgcacaccaaaaaaatacttgagctgtatatatatatgtgtgtgtgtgtgtgtgtgtgtgtgtgtgtgtgtgcatgtatgtgcacatgtgtctgtgtggtatatttgtgtatgtgtatttgtatgtactgttattgaaaatatatttaatacctttggaaaaatcttgggcaagatgacctactagttttccttgaaaaaaagttgctttgttattaatattgtgcttaaattatttttatacaccattgttccttacctttacataattgcaatatttcccccttactacttcttggaaaaaaattacaaaatgaagttttatagaaaagaaaaaaaa

SEQ ID NO: 263 - DNA, 6602 bp, Homo sapiens
acacgcgcttcaacttcggttggtgtgtgtcgaagaaacctgactgcgccctgaggagaacagcggagaaggtccaccgagcctggcgaaaggtccgctgagcgggctgtcgtccggagccactccgggctgcggagcacccagtggagaccgcgcctggctcaggtgtgggaccccatccttcctgtcttcgcagaggagtcctcgcgtggtgagtatgcgaaataagcgggttttgaaaacaaaaaaaagaaggagtggaagagggggccaggatccaggcctccatccccacagaagtgaagctacagctgggaggtctcctcccaccccaaccgtcaccctgggtcccgactgcccacctcctcctcctccccctccccccaacaacaacaacaacaacaactccaagcacaccggccataagagtgcgtgtgtccccaacatgaccgaacgaagaagggacgagctctctgaagagatcaacaacttaagagagaaggtcatgaagcagtcggaggagaacaacaacctgcagagccaggtgcagaagctcacagaggagaacaccacccttcgagagcaagtggaacccacccctgaggatgaggatgatgacatcgagctccgcggtgctgcagcagctgctgccccaccccctccaatagaggaagagtgcccagaagacctcccagagaagttcgatggcaacccagacatgctggctcctttcatggcccagtgccagatcttcatggaaaagagcaccagggatttctcagttgatcgtgtccgtgtctgcttcgtgacaagcatgatgaccggccgtgctgcccgttgggcctcagcaaagctggagcgctcccactacctgatgcacaactacccagctttcatgatggaaatgaagcatgtctttgaagaccctcagaggcgagaggttgccaaacgcaagatcagacgcctgcgccaaggcatggggtctgtcatcgactactccaatgctttccagatgattgcccaggacctggattggaacgagcctgcgctgattgaccagtaccacgagggcctcagcgaccacattcaggaggagctctcccacctcgaggtcgccaagtcgctgtctgctctgattgggcagtgcattcacattgagagaaggctggccagggctgctgcagctcgcaagccacgctcgccaccccgggcgctggtgttgcctcacattgcaagccaccaccaggtagatccaaccgagccggtgggaggtgcccgcatgcgcctgacgcaggaagaaaaagaaagacgcagaaagctgaacctgtgcctctactgtggaacaggaggtcactacgctgacaattgtcctgccaaggcctcaaagtcttcgccggcgggaaactccccggccccgctgtagagggaccttcagcgaccgggccagaaataataaggtccccacaagatgatgcctcatctccacacttgcaagtgatgctccagattcatcttccgggcagacacaccctgttcgtccgagccatgatcgattctggtgcttctggcaacttcattgatcacgaatatgttgctcaaaatggaattcctctaagaatcaaggactggccaatacttgtggaagcaattgatgggcgccccatagcatcgggcccagttgtccacgaaactcacgacctgatagttgacctgggagatcaccgagaggtgctgtcatttgatgtgactcagtctccattcttccctgtcgtcctaggggttcgctggctgagcacacatgatcccaatatcacatggagcactcgatctatcgtctttgattctgaatactgccgctaccactgccggatgtattctccaataccaccatcgctcccaccaccagcaccacaaccgccactctattatccagtagatggatacagagtttaccaaccagtgaggtattactatgtccagaatgtgtacactccagtagatgagcacgtctacccagatcaccgcctggttgaccctcacatagaaatgatacctggagcacacagtattcccagtggacatgtgtattcactgtccgaacctgaaatggcagctcttcgagattttgtggcaagaaatgtaaaagatgggctaattactccaacgattgcacctaatggagcccaagttctccaggtgaagagggggtggaaactgcaagtttcttatgattgccgagctccaaacaattttactatccagaatcagtatcctcgcctatctattccaaatttagaagaccaagcacacctggcaacgtacactgaattcgtacctcaaatacctggataccaaacataccccacatatgccgcgtacccgacctacccagtaggattcgcctggtacccagtgggacgagacggacaaggaagatcactatatgtacctgtgatgatcacttggaatccacactggtaccgccagcctccggtaccacagtacccgccgccacagccgccgcctccaccaccaccaccgccgccgcctccatcttacagtaccctgtaaatacctgtcatgtccttcaggatctctgccctcaaaatttattcctgttcagcttctcaatcagtgactgtgtgctaaattttaggctactgtatcttcaggccacctgaggcacatcctctctgaaacggctatggaaggttagggccactctggactggcacacatcctaaagcaccaaaagaccttcaacattttctgagagcaacagagtatttgccaataaatgatctctcatttttccaccttgactgccaatctaactaaaataattaataagtttactttccagccagtcctggaagtctgggttttacctgccaaaacctccatcaccatctaaattataggctgccaaatttgctgtttaacatttacagagaagctgatacaaacgcaggaaatgctgatttctttatggagggggagacgaggaggaggaggacatgacttttcttgcggtttcggtaccctctttttaaatcactggaggactgaggccttattaaggaagccaaaattatcggtgcagtgtggaaaggcttccgtgatcctctcgctgcacccttagaaacttcaccgtcttcaaactccatttccatggttctgttaattctcaaggagcagcaactcgactggttctcccaggagcaggaaaaacccttgtgacatgaaacatctcaggcctgaaaagaaagtgctctctcagatggactcttgcatgttaagactatgtcttcacatcatggtgcaaatcacatgtacccaatgactccggctttgacacaacaccttaccatcatcatgccatgatggcttccacaaagcattaaacctggtaaccagagattactggtggctccagcgttgttagatgttcatgaaatgtgaccacctctcaatcacctttgagggctaaagagtagcacatcaaaaggactccaaaatcccatacccaactcttaagagatttgtcctggtacttcagaaagaattttcatgagtgttcttaattggctggaaaagcaccagctgacgttttggaagaatctatccatgtgtctgcctccatatgcatctgggcatttcatcttcagtcccctcattagactgtagcattaggatgtgtggagagaggagaaatgatttagcacccagattcacactcctatgcctggaagggggacatctttgaagaagaggaattagggctgtggacactgtcttgaggatgtggacttccttagtgagctccacattacttgatggtaaccacttcaaaaggatcagaatccacgtaatgaaaaaggtccctctagaggatggagctgatgtgaagctgccaatggatgaaaagcctcagaaagcaactcaaaggactcaaagcaacggacaacacaagagttgtcttcagcccagtgacacctctgatgtcccctggaagctttgtgctaacctgggactgcctgacttcctttagcctggtcccttgctactaccttgaactgttttatctaacctctctttttctgtttaattctttgctactgccattgaccctgctgcaggatttgtgtcattttcctgcctggttgctgagactccattttgctgccacacacagagatgtaagaggcaggctttaattgccaaagcacagtttgagcagtagaaaacaacatggtgtatatctcaaattgcctgacatgaagaggagtctaacggtgaagtttcacttttcatcagcatcatctttcacatgttcattatcatctgctcttattcttgcatgtttaaacacttaaaatttttagtataatttttagtgtgttttgaagtggtgactaggctttcaaaaacttccattgaattacaaagcactatccagttcttattgttaaactaagtaaaaatgataagtaacatagtgtaaaatattcctttactgtgaacttcttacaatgctgtgaatgagaggctcctcagaactggagcatttgtataataattcatcctgttcatcttcaattttaacatcatatataatttcaattctatcaattgggcctttaaaaatcatataaaaggatataaaatttgaaaagagaaacctaattggctatttaatccaaaacaactttttttttccttcaatggaatcagaaagcttgtcaatcactcatgtgttttagagtaattacttttaaaatggtgcatttgtgcttctgaactattttgaagagtcacttctgtttacctcaagtatcaattcatcctccatacatttgaattcaagttgtttttttgtcaaatttacagttgtcaattgatcttcaagctgcagggtgcctagaaatgggccgttgtctgtagccctggcatgtgcacacggacatttgccaccactgcaagcaaaagtctggagaagttcaccaacgacaagaacgattagggaaaatatgctgctgtgggttaacaactcagaaagtccctgatccacatttggctgtttactaaagcttgtgattaactttttggcagtgtgtactatgctctattgctatatatgctatctataaatgtagatgttaaggataagtaattctaaatttattattctatagttttgaagtttggttaagtttcctttcactcaattgatttattttgttgttaatcaaatttatgttaattggatcctttaaattttttttggcattttccaacaaaaatggctttattcataagaaaggaaaaaaatcaatggaatttgatatctaaagaagttagaaagggagcaaaataaaaaacataaaggagatagatgaattagtaagcaaatcagtagtcgagtttttcaaactggcaaaattaattaattgacttttagcccaaatttacattgttaattaaatcaagaaggaagaagatctaagagctcccattgataggcaagcctagagagaactagctaaatttatcatgctaggatattgaaacacagaaagtttacatacatttatgaagggtcaatttagtttggacagtgaggtatttgtcttagtggaaaaaaggagaattagtctgatcaaatcgtgaagtaatacagtgaacttgcaggtgcacaaaataagagggccacatctatatggtgcagtctggaattctgtttaagtttgtaggtacctcttggacttctgaattgatccagttgtcatccaccacagacatctcacatcagatacagacagttccaagattgacaacagagaacaacctgctggaaagacctgggcagaaatggagagccctgcgggaaccatgctacattttcatctaaagagagaatgcacatctgatgagactgaaagttctttgttgttttagattgtagaatggtattgaattggtctgtggaaaattgcattgcttttatttctttgtgtaatcaagtttaagtaataggggatatataatcataagcattttagggtgggagggactattaagtaattttaagtgggtggggttatttagaatgttagaataatattatgtattagatatcgctataagtggacatgcgtacttacttgtaaccctttaccctataattgctatccttaaagatttcaaataaactcggagggaactgcagggagaccaacttatttagagcgaattggacatggataaaaaccccagtgggagaaagttcaaaggtgattagattaataatttaatagaggatgagtgacctctgataaattactgctagaatgaacttgtcaatgatggatggtaaattttcatggaagttataaaagtgataaataaaaacccttgcttttacccctgtcagtagccctcctcctaccactgaaccccattgcccctacccctccttctaactttattgctgtattctcttcactctatatttctctctatttgctaatattgcattgctgttacaataaaaattcaataaagatttagtggttaagtgcaaaaaaaaaaaaaaaaaaaaa

SEQ ID NO: 264 - DNA, 1647 bp, Homo sapiens
gggttatatgatctctttggctttagggaattactccataccagctctgagatttccagctcagcgatgcccccaggtccctgggagagctgcttctgggtggggggcctcattttgtggctcagcgttggaagttcagggttttaggaacaaagccttcctggattgacacatttattagaacccttctgcgtgcaacgaatgctaatgtgattgccgtggactggatttatgggtctacaggagtctacttctcagctgtgaaaaatgtgattaagttgagcctcgagatctcccttttcctcaataaactcctggtgctgggtgtgtcggaatcctcaatccacatcattggtgttagcctgggggcccacgttgggggcatggtgggacagctcttcggaggccagctgggacagatcacaggcctggaccccgctggacctgagtacaccagggccagtgtggaagagcgcttggatgctggagatgccctcttcgtggaagccatccacacagacaccgacaatttgggtattcggattcccgttggacatgtggactacttcgtcaacggaggccaagaccaacctggctgccccaccttcttttacgcaggttatagttatctgatctgtgatcacatgagggctgtgcacctctacatcagcgccctggagaattcctgtccactgatggcctttccctgtgccagctacaaggccttccttgctggacgctgtctggattgctttaacccttttctgctttcctgcccaaggataggactggtggaacaaggtggtgtcaagatagagccgctccccaaggaagtgaaagtctacctcctgactacttccagtgctccgtactgcatgcatcacagcctcgtggagtttcacttgaaggaactgagaaacaaggacaccaacatcgaggttaccttccttagcagtaacatcacctcttcatctaagatcaccatacctaagcagcaacgctatgggaaaggaatcatagcccatgccaccccacaatgccagataaaccaagtgaaattcaagtttcagtcttccaaccgagtttggaaaaaagaccggactaccattattgggaagttctgcactgcccttttgcctgtcaatgacagagaaaagatggtctgcttacctgaaccagtgaacttacaagcaagtgtgactgtttcctgtgacctgaagatagcctgtgtgtagtttaacctgggcaggacacatctccctgcattttttttttttttttgagagagaggtgtgatgagggatgtgtgtgtgcagcttattgtagaccattactactaaggagaaaagcaaagctctttcttattttcctcataatcagctaccctggaggggagggagaactcattttacagaacttggtttcctttgccgatcttatgtacatacccattttagctttcccatgcatacttaactgcacttgctttatctccttgggcattcgtacttaggattcaatagaaacatgtacagggtaaacaattttttaaaaataaaacttcatggagtatctgaaaaaaaaaaaaaaaaaaaaaaaaaaaaaaaaaaaaaaaaaaaaaaaaaaaaaaaaaaaaaaaaaaaaaaa

SEQ ID NO: 265 - DNA, 1798 bp, Homo sapiens
gccgcccggccgagcgcggagcgcagccactcgccgctgcccagggagcgcccaagatgtggggggaccggggcggcagcggccgtagcagcgccagggacgggggcacgcagcagcctccgctcgcccgcctgtcctgacctgcctcgcttgcccccaaagaatgtcagccaagtccaaggggaacccctcctcgtcctgtccagccgagggaccgccggcagcctccaaaaccaaggtgaaggaacagatcaagatcatcgtggaggatttggaattagtcctgggcgacctgaaggacgtggccaaggaacttaaggagatgaagtcccactctgttgcccaggctagagtgcaatggcacaatctgggctcactgcaacctctgcctcccaggttcaagctattctcctgcctcagcctgcctcagtgcgccactacgcctgggtggttgaccagattgacaccctgacctctgacctacagctggaggatgagatgactgacagctccaaaacggacacgctgaatagtagctcaagtggcacaacagcctccagcctagagaagatcaaagtgcaggctaatgcaccgcttattaaacccccagcacacccatctgctatcctcacggtcctgagaaagccaaaccctccaccacctcctccaaggttgacacctgtgaagtgtgaagaccccaaaagggtggttccaactgccaatcctgtaaaaaccaatggcacccttctacgaaatggaggcttaccaggtggacctaacaaaattccaaatggagatatctgctgcatacccaacagtaacttggacaaggctccagtccagcttctgatgcatagacctgaaaaagacagatgtccccaggcagggcctcgagaacgagttcggtttaatgaaaaagtacagtaccatggctattgtcctgactgtgatacccggtataacataaaaaacagggaggtccacttacacagtgaacctgtccacccaccgggaaagattcctcaccaaggccctcccctccctcctacaccccatctccctcctttcccactagaaaatgggggaatgggaataagccacagtaacagcttcccccctatcagacctgcaactgtgcctcctcccactgcaccaaaaccacagaagacgatcttgaggaagtcaaccactacaaccgtgtgatgtatgccattaaaaaaattgtttttttaattttctatattataaacataaaataagtaatgagcactttctactcaagcaataaaaagcccaaatatattaatcctgcattcagcaaagtggcataaaaatcacctggtaagtatgcagcacattgcttatatcctgggtatgcattattttaaatgttgtatcattaaaaacctcagaatgatgaaaaatatgaatgatgcattgtttttgcaattgacctatgacaaactgtgaacctgcagatttcacctattttgatttactataagagctgggatttgattcattttatttatgcctaagtcatctatgcattaacatgtcatattcttaactttgatctaatgctttttactaggaaattttaatactgaaggactattttattatttttttctaaagatgtttgtcactagtttttcattattaaatgctgaggccaataccaagaagtttattttctatattatacaattatgaattacatgctcagctatatatgtaataaaatactttggtctgtggaaaaaaaaaaaaaaaaaaaaaaaaaaaaaaaaaaaaa

SEQ ID NO: 266 - DNA, 1982 bp, Homo sapiens
agacaagatttttcaagcaagatgaagtccatcatcctctttgtcctttccctgctccttatcttggagaagcaagcagctgtgatgggacaaaaaggtggatcaaaaggccaattgccaagcggatcttcccaatttccacatggacaaaagggccagcactattttggacaaaaagaccaacaacatactaaatccaaaggcagtttttctattcaacacacatatcatgtagacatcaatgatcatgactggacccgaaaaagtcagcaatatgatttgaatgccctacataaggcgacaaaatcaaaacaacacctaggtggaagtcaacaactgctcaattataaacaagaaggcagagaccatgataaatcaaaaggtcattttcacatgatagttatacatcataaaggaggccaagctcatcatgggacacaaaatccttctcaagatcaggggaatagcccatctggaaagggattatccagtcaatgttcaaacacagaaaaaaggctatgggttcatggactaagtaaagaacaagcttcagcctctggtgcacaaaaaggtagaacacaaggtggatcccaaagcagttatgttctccaaactgaagaactagtagttaacaaacaacaacgtgagactaaaaattctcatcaaaataaagggcattaccaaaatgtggttgacgtgagagaggaacattcaagtaaactacaaacttcactccatcctgcacatcaagacagactccaacatggacccaaagacatttttactacccaagatgagctcctagtatataacaagaatcaacaccagacaaaaaatctcagtcaagatcaagagcatggccggaaggcacataaaatatcatacccgtcttcacgtacagaagaaagacaacttcaccatggagaaaagagtgtacagaaagatgtatccaaaggcagcatttctatccaaactgaagagaaaatacatggcaagtctcaaaaccaggtaacaattcatagtcaagatcaagagcatggccataaggaaaataaaatatcataccaatcttcaagtacagaagaaagacatctcaactgtggagaaaagggcatccagaaaggtgtatccaaaggcagtatttcgatccaaactgaagagcaaatacatggcaagtctcaaaaccaggtaagaattcctagtcaagctcaagagtatggccataaggaaaataaaatatcataccaatcttcgagtacagaagaaagacgtctcaacagtggagaaaaggatgtacagaaaggtgtatccaaaggcagtatttctatccaaactgaagagaaaatacatggcaagtctcaaaaccaggtaacaattcctagtcaagatcaagagcatggccataaggaaaataaaatgtcataccaatcttcaagtacagaagaaagacgactcaactatggaggaaagagcacgcagaaagatgtatcccaaagcagtatttctttccaaattgaaaagctagtagaaggcaagtctcaaatccagacaccaaatcctaatcaagatcaatggtctggccaaaatgcaaaaggaaagtctggtcaatctgcagatagcaaacaagacctactcagtcatgaacaaaaaggcagatacaaacaggaatccagtgagtcacataatattgtaattactgagcatgaggttgcccaagatgatcatttgacacaacaatataatgaagacagaaatccaatatctacatagccctgttgcttagcaaccacttgaaaagctggaccaatagcaaggtgtcacccgacctcagtgaagtctttgatgtttctgagaggcagactcccatgtggtcccagatccttggtccatggatgacaccaccttcccatgcttccttgcattaggctttctaaacccggagccccttcaaacttccaataaagggatcattttctgcttta

SEQ ID NO: 267 - DNA, 2894 bp, Homo sapiens
atatggatgcacacagagcctgtagacctgagtggatggacactgcctcttagaactagaacttagaactttatcttgaaaatgtaccactgttgcagaagctcctcacagagtatgtgtcaggcatttttaacctgctaaaggcaagaagaagtgttcaccacatagttgcaaaggtcttcaacttgccacagccaacagaaaaatcaaaatgattgaaccctttgggaatcagtatattgtggccaggccagtgtattctacaaatgcttttgaggaaaatcataaaaagacaggaagacatcataagacatttctggatcatctcaaagtgtgttgtagctgttccccacaaaaggccaagagaattgtcctctctttgttccccatagcatcttggttgccagcataccggcttaaagaatggttgctcagtgatattgtttctggtatcagcacagggattgtggccgtactacaaggtttagcatttgctctgctggtcgacattcccccagtctatgggttgtatgcatcctttttcccagccataatctaccttttcttcggcacttccagacacatatccgtgggtccgtttccgattctgagtatgatggtgggactagcagtttcaggagcagtttcaaaagcagtcccagatcgcaatgcaactactttgggattgcctaacaactcgaataattcttcactactggatgacgagagggtgagggtggcggcggcggcatcagtcacagtgctttctggaatcatccagttggcttttgggattctgcggattggatttgtagtgatatacctgtctgagtccctcatcagtggcttcactactgctgctgctgttcatgttttggtttcccaactcaaattcatttttcagttgacagtcccgtcacacactgatccagtttcaattttcaaagtactatactctgtattctcacaaatagagaagactaatattgcagacctggtgacagctctgattgtccttttggttgtatccattgttaaagaaataaatcagcgcttcaaagacaaacttccagtgcccattccaatcgaattcattatgaccgtgattgcagcaggtgtatcctacggctgtgactttaaaaacaggtttaaagtggctgtggttggggacatgaatcctggatttcagccccctattacacctgacgtggagactttccaaaacaccgtaggagattgcttcggcatcgcaatggttgcatttgcagtggccttttcagttgccagcgtctattccctcaaatacgattatccacttgatggcaatcaggagttaatagccttgggactgggtaacatagtctgtggagtattcagaggatttgctgggagtactgccctctccagatcagcagttcaggagagcacaggaggcaaaacacagattgctgggcttattggtgccatcatcgtgctgattgtcgttctagccattggatttctcctggcgcctctacaaaagtccgtcctggcagctttagcattgggaaacttaaagggaatgctgatgcagtttgctgaaataggcagattgtggcgaaaggacaaatatgattgtttaatttggatcatgaccttcatcttcaccattgtcctgggactcgggttaggcctggcagctagtgtggcatttcaactgctaaccatcgtgttcaggacccaatttccaaaatgcagcacgctggctaatattggaagaaccaacatctataagaataaaaaagattattatgatatgtatgagccagaaggagtgaaaattttcagatgtccatctcctatctactttgcaaacattggtttctttaggcggaaacttatcgatgctgttggctttagtccacttcgaattctacgcaagcgcaacaaagctttgaggaaaatccgaaaactgcagaagcaaggcttgctacaagtgacaccaaaaggatttatatgtactgttgacaccataaaagattctgacgaagagctggacaacaatcagatagaagtactggaccagccaatcaataccacagacctgcctttccacattgactggaatgatgatcttcctctcaacattgaggtccccaaaatcagcctccacagcctcattcttgacttttcagcagtgtcctttcttgatgtttcttcagtgaggggccttaaatcgattttgcaagaatttatcaggatcaaggtagatgtgtatatcgttggaactgatgatgacttcattgagaagcttaaccggtatgaattttttgatggtgaagtgaaaagctcaatatttttcttaacaatccatgatgctgttttgcatattttgatgaagaaagattacagtacttcaaagtttaatcccagtcaggaaaaagatggaaaaattgattttaccataaatacaaatggaggattacgtaatcgggtatatgaggtgccagttgaaacaaaattctaatcaacatataattcagaaggatcttcatctgactatgacataaaaacaactttatacccagaaagttattgataagttcatacattgtacgaagagtatttttgacagaatatgtttcaaactttggaacaagatggttctagcatggcatatttttcacatatctagtatgaaattatataagtattctaaattttatatcttgtagctttatcaaagggtgaaaattattttgttcatacatatttttgtagcactgacagatttccatcctagtcactaccttcatgcataggtttagcagtatagtggcgccactgttttgaatctcataatttatacaggtcatattaatatatttccattaaaaaatcagttgtacagtgga

SEQ ID NO: 268 - DNA, 3894 bp, Homo sapiens
agtagtgaatcgtagcatgttagagttagaaggttcagtgttgatggagttattgaagaaatgatggagtaagagactcttttctaagcaactcaagtttgcagtgattcaggcctacttctgaagagacagccttttatctcaatgaatgacacagaaaaaccagcagatactccctctgaggaagaggactttggtgatccaaggacatatgacccagatttcaaggggcctgttgccaacaggagttgtacagatgttctgtgctgtatgatcttcctactgtgtattattggctacattgttttaggacttgtggcctgggtacatggggaccccagaagagcagcctatcctacagacagccagggccacttttgtggccagaagggcactcccaatgagaacaagaccattttgttttactttaacctgttacgctgtaccagtccctccgtgttgctaaacctacagtgccctaccacacagatctgtgtctccaagtgcccagaaaaatttttaacctatgtggaaatgcaacttttgtacacaaaagacaaaagctactgggaagactaccgtcagttctgtaagaccactgctaagcctgtgaagtctctcacacagcttttactggatgatgattgtccaacagcgatttttcccagcaaaccttttctccagagatgtttccctgacttctctaccaaaaatggcactttaacaataggaagtaagatgatgtttcaagatggaaatggagggacaagaagtgttgtagaactcgggattgctgcaaatggtatcaataaacttcttgatgcaaagtcacttggattgaaagtgtttgaagactatgcaagaacttggtattggattctcattggcctgacgattgccatggtccttagttggatatttttgatacttctgaggttcatagctggatgcctcttctgggtcttcatgattggtgtgattggaattataggttatggaatatggcactgttaccagcagtacaccaatcttcaggaacgcccaagttctgtattaactatctatgacatcgggattcagactaacataagcatgtactttgaactgcaacaaacatggttcacatttatgataatactctgcatcattgaagtgattgtcatcctcatgctgatcttcctcaggaatcgaatccgagtcgccattatcctgctgaaggaaggaagcaaagccattggatatgttcctagtacattagtctatccagctttaactttcattttgctctcaatctgcatttgctactgggtcgtgacagcagttttcttggcgacatcgggggtacctgtatacaaagtcatagctccaggggggcattgtatacatgaaaatcaaacctgtgacccagagatttttaatacaactgaaattgccaaagcttgccctggggctctgtgtaactttgctttctatggtggaaagagcttgtaccatcagtacatccctaccttccatgtatacaacttatttgtctttctctggcttataaacttcgtcattgcattaggtcagtgcgcccttgctggtgcattcgctacttattactgggccatgaaaaaacctgatgacatcccacgatatccactttttactgcatttggacgagccatacgatatcacacaggatccctagcatttggatctttaattattgcattaattcaaatgtttaaaattgtactagaatacttggaccaccgtcttaaacgtacccagaacacattgtctaaattcctacaatgctgcctgagatgctgcttctggtgtttggaaaatgcaataaagtttttaaacagaaatgcctatattatgattgcaatatatggcagaaacttctgcaggtcagcaaaagatgctttcaatctgctgatgagaaatgttttgaaagttgcagttacagatgaagttacatactttgtattattcctggggaaacttctagttgctggaagtataggtgttctggccttcctattcttcacacaaagactgccagtgattgcacaaggaccagcatctttaaattactactgggtacctttgctgacagtcatttttgggtcttacctgattgcacatgggttcttcagcgtctatgcaatgtgtgttgaaacaattttcatctgcttcttggaagatttagaaagaaatgatggttctactgcaagaccttattatgtgagtcaacctttgctgaagattttccaggaggaaaatccacaaactaggaagcagtagaagagcaaactggtcgtcctacagctgtgtgttaccttttctccatctgctgtgtctgtgcaacatttgtttcataagtgctttgtgtttagcaacactgtattcacgaccttgttggcttgcatttgcatgttttataccaaagcttatactgtactatgtgaagccatcagaagtcgcaagggaattgttaataacataaaacatttttatactaagatcatttgttttgtaattcgtttttaaagagtggcttggatgttttgaaaatactactgaatatgttaatattcttttaaatcttagattgaaaaatgatacattacttaaattgatagctcctaatatatttttaaaattacaactaaaagaagacttcttctgcagggaaaattggtcagcaaagtgaaattaaaaattttaaagtttttcccactctcgttggacagtaaatcagtgaaaggactgccccagttgagagtttgctctctttaagtatagaatgtttcctcttaaacaaattgccaatcatccagcctttactacttagccctctgacaaagtgccttactggctatttaatattacccagcttttatgggcaagtttacaaacattgttttttaaaaaattaaaacctgcaatgtttcgtgattaaaacaagtcttattgcatttgtttcactcttagctcactgattggaaaacatttgtcattttgctctgtttgatatcctcactattatggaatacattgtgcagctaaacaatttcccttgcgcctagtggacattcatgaatgtgtactacacgcaagaagaaacaaaccccgaaagaacacttgttggatttctttgtttttttttttactaaaagagaagttttaaaatgaaatgttttctatagtagatctttgaaaatacaataggtataatactgcatttctcagtgttttacaaagatcagaaagagaaacttctaggaattgcaaagggaaactttactcctcgaaagggtgctcacagatgtcatgtactgaatagctcccttttaaatgatcatttattttcatcaaagcctgttctatatatgccacttcattttctaacttttggtatgaaaaaatcagtttacttacagtatgttaattgtattgtactactataaacaggaacataatttccaattcagttttaaataattttaccagtactactaacttttaaggaaattaattcagttggttactcagtgtttgttacagaaagagtccagaaaagtattcaccctaagagaatgtcaatcatataatgataatttgtgaaagctttgagaatcaatcatcagtaagttactatcagtttataaaatattatcacatttgtttaaatgtgactttagatacttttatgccaaaaataaactcacatgagcacatgacagtctgagctctataatcagtgtgcttctgctgtgcagaaatgttagaaacgtattgtctaaatatctttgataattaaaatgtttaatatttaatgaaatttgttgttacttgttttaaatcttttttcttttaataaagatttaaataagaaat

SEQ ID NO: 269 - DNA, 2799 bp, Homo sapiens
agcttcgaggccagtgggaggagggaggggccaggcagctgagggccaggaaagatgtgaaaaactctagctggtgaccgagaggaggagtagagtgtgcccttagttcatatgaactagagggagttggtatttgcacagcagtcagggtcacatgagtgatcatggtacagtgagaagttctccctcccagggccaggtcacagggtttgtttctgttcaatccggattcttccagtaaaagcttcaacttcccacactgaagctgagagcctcccaaagtgctggctacctgctgagcgcccccgtaactctgacacagtagtaatttgagcctctgcaattgccgtctgcttcctgtgaaagtcctttccgtgcccactgacccttgagtgggcctttgagctgctgactttcagctggaacttgaagggaccccaaccctgagacactatggccctgacctcagacctggggaaacagataaaactgaaagaggtggaggggaccctcctgcagcctgcaactgtggacaactggagccagatccagagcttcgaggccaaaccagatgatctcctcatctgcacctaccctaaagcagggacaacgtggattcaggaaattgtggatatgattgaacagaatggggacgtggagaagtgccagcgagccatcatccaacaccgccatcctttcattgagtgggctcggccaccccaaccttctggtgtggaaaaagccaaagcaatgccctctccacggatactaaagactcacctttccactcagctgctgccaccgtctttctgggaaaacaactgcaagttcctttatgtagctcgaaatgccaaagactgtatggtttcctactaccatttccaaaggatgaaccacatgcttcctgaccctggtacctgggaagagtattttgaaaccttcatcaatggaaaagtggtttggggttcctggtttgaccacgtgaaaggatggtgggagatgaaagacagacaccagattctcttcctcttctatgaggacataaagagggacccaaagcatgaaattcggaaggtgatgcagttcatgggaaagaaggtggatgaaacagtgctagataaaattgtccaggagacgtcatttgagaaaatgaaagaaaatcccatgacaaatcgttctacagtttccaaatctatcttggaccagtcaatttcctccttcatgagaaaaggaactgtgggggattggaaaaaccacttcactgttgcccagaatgagaggtttgatgaaatctatagaagaaagatggaaggaacctccataaacttctgcatggaactctgagcaagatgtaaataaaattaaaaggtggatggcaagagtgcaaatactatcttcaatccttcagtcccagccagaagaatctctgaaagcatattgtgaatgtatacaatgtagtacaaacaatctctgtgatgattaacagtatgtcaccacttcattttttaaaaaggatcacgtctaatgcccattttcccaactattctttccaaagtaagatataaggtagcttaataaactaagtaaaacgtatgacttgagtacaaaaggattgttttaatccccattattctggaaagtgcatcctagtctcccagtctataacatcataataccttgagtataagtccaaatattaggttatatctatattaaaaacaaaatttctgtcatctgtcctggccattcaggcaactccagcctgggctcaatcctggagttctgtctggtcactatcagaaggaacactttgagggaaaccctggtgcagccagccctgaggaaacatggcctgagtgccctcactggtgggtgggaataaaatggaagtgcacagaggagatgtcagaagaccaaaacttggtgaatagtcccagtgctaggtcatataggaaacagaaagcatgacagtggccttttgggaacccaagttacgtcctggtgaaagcagaaaggaggagacaggatggctgtcaacaacgtcagcatgggcatggctcccaggcatggaggtaattgggtcttggcttcaatgccacccttttgggaagccctaaaccaagtgaggtgttcttttcccttgcttcccatatttgtcccagttgcagccctgttgttatgtatttactcttcaatttcttatttatacctctcactcaattgttaattctttgggttcagtctcatgccatatttactcctagtacctaatgcagtgcctggcacacagcaagtgcccttgagaacttgtagagggagtaaaaaagtgcatggataaatgactgcagcaaatcacaaattttgaactttgacccttttcttttagtcccaaatagtggcattccatagctgagggtagtaggagcagttcaccctgggagcagacaataagaggaagaatgaagccaactaaaattctgaatgctttttgttggatttcgtagggtattttttttaaaatagggtcttgctatgttgcccaggctggtcttaactgactgctttttattattaccatgcactggcaattccaaacaatgtcagtgttaaaatgcttctccctgaaaaagagaaaaaaaaaaggaaaaaaagaaaagaaaagtgaaaagaaaaactcttattggcctaagttctaaataatagctaggttaccactgagttttaactatatgtatatgagcttcaaataagcacctttttattatgtaaataaataaaagttatctgtatccccaaaaa

SEQ ID NO: 270 - DNA, 1054 bp, Homo sapiens
gccaaaacagtgggggctgaactgacctctcccctttgggagagaaaaactgtctgggagcttgacaaaggcatgcaggagagaacaggagcagccacagccaggagggagagccttccccaagcaaacaatccagagcagctgtgcaaacaacggtgcataaatgaggcctcctggaccatgaagcgagtcctgagctgcgtcccggagcccacggtggtcatggctgccagagcgctctgcatgctggggctggtcctggccttgctgtcctccagctctgctgaggagtacgtgggcctgtctgcaaaccagtgtgccgtgccagccaaggacagggtggactgcggctacccccatgtcacccccaaggagtgcaacaaccggggctgctgctttgactccaggatccctggagtgccttggtgtttcaagcccctgcaggaagcagaatgcaccttctgaggcacctccagctgcccccggccgggggatgcgaggctcggagcacccttgcccggctgtgattgctgccaggcactgttcatctcagcttttctgtccctttgctcccggcaagcgcttctgctgaaagttcatatctggagcctgatgtcttaacgaataaaggtcccatgctccacccgaggacagttcttcgtgcctgagactttctgaggttgtgctttatttctgctgcgtcgtgggagagggcgggagggtgtcaggggagagtctgcccaggcctcaagggcaggaaaagactccctaaggagctgcagtgcatgcaaggatattttgaatccagactggcacccacgtcacaggaaagcctaggaacactgtaagtgccgcttcctcgggaaagcagaaaaaatacatttcaggtagaagttttcaaaaatcacaagtctttcttggtgaagacagcaagccaataaaactgtcttccaaagtggtcctttatttcacaaccactctcgctactgttcaatacttgtactattcctgggttttgtttctttgtacagtaaacattatgaacaaacaggca

SEQ ID NO: 271 - DNA, 1669 bp, Homo sapiens
gaggtataagagcctccaagtctgcagctctcgcccaactcccagacacctcgcgggctctgcagcaccggcaccgtttccaggaggcctggcggggtgtgcgtccagccgttgggcgctttctttttggacctcggggccatccacaccgtcccctccccctcccgcctccctccccgcctcccccgcgcgccctccccgcggaggtccctcccgtccgtcctcctgctctctcctccgcgggccgcatcgcccgggccggcgccgcgcgcgggggaagctggcgggctgaggcgccccgctcttctcctctgccccgggcccgcgaggccacgcgtcgccgctcgagagatgatgcaggacgtgtccagctcgccagtctcgccggccgacgacagcctgagcaacagcgaggaagagccagaccggcagcagccgccgagcggcaagcgcgggggacgcaagcggcgcagcagcaggcgcagcgcgggcggcggcgcggggcccggcggagccgcgggtgggggcgtcggaggcggcgacgagccgggcagcccggcccagggcaagcgcggcaagaagtctgcgggctgtggcggcggcggcggcgcgggcggcggcggcggcagcagcagcggcggcgggagtccgcagtcttacgaggagctgcagacgcagcgggtcatggccaacgtgcgggagcgccagcgcacccagtcgctgaacgaggcgttcgccgcgctgcggaagatcatccccacgctgccctcggacaagctgagcaagattcagaccctcaagctggcggccaggtacatcgacttcctctaccaggtcctccagagcgacgagctggactccaagatggcaagctgcagctatgtggctcacgagcggctcagctacgccttctcggtctggaggatggagggggcctggtccatgtccgcgtcccactagcaggcggagccccccaccccctcagcagggccggagacctagatgtcattgtttccagagaaggagaaaatggacagtctagagactctggagctggataactaaaaataaaaatatatgccaaagattttcttggaaattagaagagcaaaatccaaattcaaagaaacagggcgtggggcgcacttttaaaagagaaagcgagacaggcccgtggacagtgattcccagacgggcagcggcaccatcctcacacctctgcattctgatagaagtctgaacagttgtttgtgttttttttttttttttttttgacgaagaatgtttttatttttatttttttcatgcatgcattctcaagaggtcgtgccaatcagccactgaaaggaaaggcatcactatggactttctctattttaaaatggtaacaatcagaggaactataagaacacctttagaaataaaaatactgggatcaaactggcctgcaaaaccatagtcagttaattctttttttcatccttcctctgaggggaaaaacaaaaaaaaacttaaaatacaaaaaacaacattctatttatttattgaggacccatggtaaaatgcaaatagatccggtgtctaaatgcattcatatttttatgattgttttgtaaatatctttgtatatttttctgcaataaataaatataaaaaatttagagaaaaa

SEQ ID NO: 272 - DNA, 823 bp, Homo sapiens
aaacgcgggcgggcgggcccgcagtcctgcagttgcagtcgtgttctccgagttcctgtctctctgccaacgccgcccggatggcttcccaaaaccgcgacccagccgccactagcgtcgccgccgcccgtaaaggagctgagccgagcgggggcgccgcccggggtccggtgggcaaaaggctacagcaggagctgatgaccctcatgatgtctggcgataaagggatttctgccttccctgaatcagacaaccttttcaaatgggtagggaccatccatggagcagctggaacagtatatgaagacctgaggtataagctctcgctagagttccccagtggctacccttacaatgcgcccacagtgaagttcctcacgccctgctatcaccccaacgtggacacccagggtaacatatgcctggacatcctgaaggaaaagtggtctgccctgtatgatgtcaggaccattctgctctccatccagagccttctaggagaacccaacattgatagtcccttgaacacacatgctgccgagctctggaaaaaccccacagcttttaagaagtacctgcaagaaacctactcaaagcaggtcaccagccaggagccctgacccaggctgcccagcctgtccttgtgtcgtctttttaatttttccttagatggtctgtcctttttgtgatttctgtataggactctttatcttgagctgtggtatttttgttttgtttttgtcttttaaattaagcctcggttgagcccttgtatattaaataaatgcatttttgtccttttttagacaaaaaaaaaaaaaaa

SEQ ID NO: 273 - DNA, 473 bp, Homo sapiens
ttttttttacataatatgttgtttatttgatattctggagaagtccaaacacacaaagtgattctgtatttgcgagaaatttaaggagatgatgaaaatgggtaaaaaatagatttaaaagggtgatgaaagtattatgtataatattataatggtaaatatgtgatatgaatttgttgaaatcaacagaatatacagcataaagggttaattccaattcacaaaaatataaataaataggagattaggaattccaggatagaatgcagacaatatagaaaatatctaatgtcattacaaatgtatgaaatcagaagaggtgccaagtgacctcagaaatagtgtagtcaataaaagaataaagaaagtgcacgtcagaactgtaccccagctgatgatgttccacaaaagagcaaaacatacacaatctggttccactctacagaaatcctggaactggactacaaagggaa

SEQ ID NO: 274 - DNA, 1415 bp, Homo sapiens
gaggagagcaggccaaggggctatataacccttcagctttcagcttccctgaacaccacccagtgtggagcagcccagccaagcactgtcaggaatcctgtgaagcagctccagctatgtgtgaagaagaggacagcactgccttggtgtgtgacaatggctctgggctctgtaaggccggctttgctggggacgatgctcccagggctgttttcccatccattgtgggacgtcccagacatcagggggtgatggtgggaatgggacaaaaagacagctacgtgggtgacgaagcacagagcaaaagaggaatcctgaccctgaagtacccgatagaacatggcatcatcaccaactgggacgacatggaaaagatctggcaccactctttctacaatgagcttcgtgttgcccctgaagagcatcccaccctgctcacggaggcacccctgaaccccaaggccaaccgggagaaaatgactcaaattatgtttgagactttcaatgtcccagccatgtatgtggctatccaggcggtgctgtctctctatgcctctggacgcacaactggcatcgtgctggactctggagatggtgtcacccacaatgtccccatctatgagggctatgccttgccccatgccatcatgcgtctggatctggctggccgagatctcactgactacctcatgaagatcctgactgagcgtggctattccttcgttactactgctgagcgtgagattgtccgggacatcaaggagaaactgtgttatgtagctctggactttgaaaatgagatggccactgccgcatcctcatcctcccttgagaagagttacgagttgcctgatgggcaagtgatcaccatcggaaatgaacgtttccgctgcccagagaccctgttccagccatccttcatcgggatggagtctgctggcatccatgaaaccacctacaacagcatcatgaagtgtgatattgacatcaggaaggacctctatgctaacaatgtcctatcagggggcaccactatgtaccctggcattgccgaccgaatgcagaaggagatcacggccctagcacccagcaccatgaagatcaagatcattgcccctccggagcgcaaatactctgtctggatcggtggctccatcctggcctctctgtccaccttccagcagatgtggatcagcaaacaggaatacgatgaagccgggccttccattgtccaccgcaaatgcttctaaaacactttcctgctcctctctgtctctagcacacaactgtgaatgtcctgtggaattatgccttcagttcttttccaaatcattcctagccaaagctctgactcgttacctatgtgttttttaataaatctgaaataggctactggtaaaaaaaaaaaaaaaaaa

SEQ ID NO: 275 - DNA, 1216 bp, Homo sapiens
gcctctggggttttatattgctctggtattcatgccaaagacacaccagccctcagtcactgggagaagaacctctcataccctcggtgctccagtccccagctcactcagccacacacaccatgtgtgaagaggagaccaccgcgctcgtgtgtgacaatggctctggcctgtgcaaggcaggcttcgcaggagatgatgccccccgggctgtcttcccctccattgtgggccgccctcgccaccagatctggcaccactccttctacaatgagctgcgtgtagcacctgaagagcaccccaccctgctcacagaggctcccctaaatcccaaggccaacagggaaaagatgacccagatcatgtttgaaaccttcaatgtccctgccatgtacgtcgccattcaagctgtgctctccctctatgcctctggccgcacgacaggcatcgtcctggattcaggtgatggcgtcacccacaatgtccccatctatgaaggctatgccctgccccatgccatcatgcgcctggacttggctggccgtgacctcacggactacctcatgaagatcctcacagagagaggctattcctttgtgaccacagctgagagagaaattgtgcgagacatcaaggagaagctgtgctatgtggccctggattttgagaatgagatggccacagcagcttcctcttcctccctggagaagagctatgagctgccagatgggcaggttatcaccattggcaatgagcgcttccgctgccctgagaccctcttccagccttcctttattggcatggagtccgctggaattcatgagacaacctacaattccatcatgaagtgtgacattgacatccgtaaggacttatatgccaacaatgtcctctctgggggcaccaccatgtaccctggcattgctgacaggatgcagaaggagatcacagccctggcccccagcaccatgaagatcaagattattgctcccccagagcggaagtactcagtctggatcgggggctctatcctggcctctctctccaccttccagcagatgtggatcagcaagcctgagtatgatgaggcagggccctccattgtccacaggaagtgcttctaaagtcagaacaggttctccaaggatcccctcgagactactctgttaccagtcatgaaacattaaaacctacaagccttaaaaaaaaaaaaaaa

SEQ ID NO: 276 - DNA, 672 bp, Homo sapiens
caggccagccctggggcgccttaaaaaccggagctggcgcttggcatcgccactctgggcaggatccaacgtcgctccagctgctcttgacgactccacagataccccgaagccatggcaagcaagggcttgcaggacctgaagcaacaggtggaggggaccgcccaggaagccgtgtcagcggccggagcggcagctcagcaagtggtggaccaggccacagaggcggggcagaaagccatggaccagctggccaagaccacccaggaaaccatcgacaagactgctaaccaggcctctgacaccttctctgggattgggaaaaaattcggcctcctgaaatgacagcagggagacttgggtcggcctcctgaaatgacagcagggagacttgggtgaccccccttccaggcgccatctagcacagcctggccctgatctccgggcagccaccacctcctcggtctgccccctcattaaaattcacgttcccaccctgtgtccacttcatgattcctcgcaagctgggcccagtcctctcatcccaagagcagagccaccgtagccggagtcctagcctcccaaattcggaaatccaatccaacggtctcaggaatgttttccatcccgccacgcgcctcccgaagctcccagaccggaggctcagccccc

SEQ ID NO: 277 - DNA, 1599 bp, Homo sapiens
ggcaggcccctacagccaatggaacggccctggaagagacccgggtcgcctccggagcttcaaaaacatgtgaggagggaagagtgtgcagacggaacttcagccgctgcctctgttctcagcgtcagtgccgccactgcccccgccagagcccaccggccagcatgtcctctgctcacttcaaccgaggccctgcctacgggctgtcagccgaggttaagaacaagctggcccagaagtatgaccaccagcgggagcaggagctgagagagtggatcgagggggtgacaggccgtcgcatcggcaacaacttcatggacggcctcaaagatggcatcattctttgcgaattcatcaataagctgcagccaggctccgtgaagaagatcaatgagtcaacccaaaattggcaccagctggagaacatcggcaacttcatcaaggccatcaccaagtatggggtgaagccccacgacatttttgaggccaacgacctgtttgagaacaccaaccatacacaggtgcagtccaccctcctggctttggccagcatggcgaagacgaaaggaaacaaggtgaacgtgggagtgaagtacgcagagaagcaggagcggaaattcgagccggggaagctaagagaagggcggaacatcattgggctgcagatgggcaccaacaagtttgccagccagcagggcatgacggcctatggcacccggcgccacctctacgaccccaagctgggcacagaccagcctctggaccaggcgaccatcagcctgcagatgggcaccaacaaaggagccagccaggctggcatgactgcgccagggaccaagcggcagatcttcgagccggggctgggcatggagcactgcgacacgctcaatgtcagcctgcagatgggcagcaacaagggcgcctcgcagcggggcatgacggtgtatgggctgccacgccaggtctacgaccccaagtactgtctgactcccgagtacccagagctgggtgagcccgcccacaaccaccacgcacacaactactacaattccgcctagggccacaaggccttccctgttttccccccaagggaggctgctgctgctcttggctggacccagccaggcccagccgaccccctctccctgcatggcatcctccagcccctgtagaactcaacctctacagggttagagtttggagagagcagactggcggggggcccattggggggaaggggaccctccgctctgtagtgctacagggtccaacatagagccgggtgtccccaacagcgcccaaaggacgcactgagcaacgctattccagctgtccccccactccctcacaagtgggtacccccaggaccagaagctcccccagcaaagcccccagagcccaggctcggcctgcccccaccccattcccgcagtgggagcaaactgcatgcccagagacccagcggacacacgcggtttggtttgcagcgactggcatactatgtggatgtgacagtggcgtttgtaatgagagcactttcttttttttctatttcactggagcacaataaatggctgtaaaatctcaaaaaaaaaaaaa

SEQ ID NO: 278 - DNA, 1538 bp, Homo sapiens
tgggaaggggtgggctgcagcactggaggaagggaaccctccaccctgagatctctgtctctatcctatcctgtccctggccttctgaggcaagcggggccaattaaggggaaaacgtacctcctccatttgtgctgaaccaatccctccaacccctctcaggagggcatgatatggagagttgggcattggctgtgttccctgaatacagagtatctctcttgtggtgcctggaactggcatcccctttgtggagcttagggcaagccccgcctctgcatgagacttggtttgtgggacacacttggtttcagggaaggggaaagaggtcaccaagggcagaggtgtccaggccggagccaggggccccactgttgggatgctggctgcagtggggcgccccaagcccaggtcccctctgtcttctctttcgactttgcagctgtacttgttttgctcctctacccgcaggagctgacatggacccaaatcctcgggccgccctggagcgccagcagctccgccttcgggagcggcaaaaattcttcgaggacattttacagccagagacagagtttgtctttcctctgtcccatctgcatctcgagtcgcagagaccccccataggtagtatctcatccatggaagtgaatgtggacacactggagcaagtagaacttattgaccttggggacccggatgcagcagatgtgttcttgccttgcgaagatcctccaccaaccccccagtcgtctggtatgcccctctgctttggggacttcagtgccagtcagccagagccggatgtcaggctctgaaacgaggctacaaggctgggctggggaagtacacaaggatggacaaccatttggaggagctgagcctgccggtgcctacatcagacaggaccacatctaggacctcctcctcctcctcctccgactcctccaccaacctgcatagcccaaatccaagtgatgatggagcagatacgcccttggcacagtcggatgaagaggaggaaaggggtgatggaggggcagagcctggagcctgcagctagcagtgggcccctgcctacagactgaccacgctggctattctccacatgagaccacaggcccagccagagcctgtcgggagaagaccagactctttacttgcagtaggcaccagaggtgggaaggatggtgggattgtgtacctttctaagaattaaccctctcctgctttactgctaattttttcctgctgcaaccctcccaccagtttttggcttactcctgagatatgatttgcaaatgaggagagagaagatgaggttggacaagatgccactgcttttcttagcactcttccctcccctaaaccatcccgtagtcttctaatacagtctctcagacaagtgtctctagatggatgtgaactccttaactcatcaagtaaggtggtactcaagccatgctgcctccttacatcctttttggaacagagcacggtataaataataaactaataataatatgccaaccaaaaaa

SEQ ID NO: 279 - DNA, 2579 bp, Homo sapiens
gcagagcagcggcggcagcggcggcggcggcagcagccacccgatgtcttcggcgcccgagaagcagcagccaccgcacggcggcggcggcggcggcggcgggggaggcggcgcggccatggaccccgcgtcgtccggcccgtccaaggccaagaagaccaacgccggcatccggcgcccggagaagccgccctattcctacatcgcgctcatcgtcatggccatccagagttcacccaccaagcgcctgacgctgagcgagatctaccagttcctgcagagccgcttccccttcttccggggctcctaccagggctggaagaactccgtgcgccacaacctctcgctcaacgagtgcttcatcaagctacccaagggccttgggcggcccggcaagggccactactggaccatcgacccggccagcgagttcatgttcgaggagggctcctttcggcggcggccgcgcggcttccgaaggaaatgccaggcgctcaagcccatgtacagcatgatgaacgggctcggcttcaaccacctcccggacacctacggcttccagggctcggccggcggcctctcgtgcccgcccaacagcctggcgctggagggcggcctgggcatgatgaacggccacttgccgggcaacgtggacggcatggccctgcccagccactcggtgccccacctgccttccaacggcggccactcgtacatgggcggctgcggcggcgcggcggccggcgagtacccgcaccacgacagctcggtgcccgcctccccgctgctgcccaccggcgccggtggggtcatggagccgcacgccgtctactcgggctcggcggcggcctggccgccctcggcgtccgcggcgctcaacagcggcgcctcttatatcaagcagcagcccctgtccccctgtaaccccgcggccaaccccctgtccggcagcctctccacgcactccctggagcagccgtatctgcaccagaacagccacaacgccccagccgagctgcaaggcatcccgcggtatcactcgcagtcgcccagcatgtgtgaccgaaaggagtttgtcttctctttcaacgccatggcgtcctcttccatgcactcggccggcgggggctcctactaccaccagcaggtcacctaccaagacatcaagccttgcgtgatgtgaggctgccgccgcaggccctcctggtgcaggcaggcgggtcacagggaccctggaccggcacaagaaactgctttcttctcgaggtataaccgtcggcagaagaaaagggttccacctctccccaaccggagtttttggcaaggagtccccaatgcaaagacacagcgctgcggttggcacctccttcctcactccttcaaaattgttaagaaatgttagtggtgggtctgatctgactgcagccatcggtaaataaaagtttttgatcctgttgaacccgcctgagacggtgctgtgcaggggaaagcccccgcacccacacaggaattctgctgaggtcccccctccttccggccaatggcagaagtgggggaaaatttttagaagaaaagcaaacatgtgagaccaatcattatcaaatacttttattttttggttgagtatttatctttttattttttattttttttttgaaagaatgtcttggaatgcgcaagtctccctttagagccgtcttttgcagggagcgggaagtgacaagagctcagatctccctcccgatctccctccccacctccgaagtctcctccgtggaccacaggtggatctttgtgcgaacaacttgcatttcggaagccactgtccgtctttaaacagaaagtcaaaggagccacgaagcaagcggccgtccgggcgtccgcctccgtccccttccatgttcctcctcttccttcgcttcagcctcttctgttatgttttgtcttgaattttatttagactttttcagtgggtatttttctgtctcccaacctctactgtaaactttctggtccgagaacgagccgaacacagcgcgacgcagggactaggacggcccggtgaccgcgcggattcaggattgcggggacgcagaaaggttaaggcacttttaaaaactatagcaaggctcctgtttatttattctactttctttccctaataatcaaaacaccgcgtaggctcctccgtttatcagtattaatggtgtaactttgttggcaatatttgccgtgtagaattttttttagatatccattgtaaatttgaaacaaagaccgatctgtgtaaaaacaaatttccatatgttttatataaatatatatataatatgaaggactaccctccttttttttttttgtattttggctgctagagtgcagcatttgtgacacgtatttgaaatttgaaatttccttctgcactgtataaaaggaccatttgaggatgttttgccttttgtgtattttttcctaaaaaaagaacaaaaataaaaatgtataacatttgtacatggcctttaaaattgtatcaactagaaataaaattgcatgagtattttaaaaaaaaaaaaaaaaaa

SEQ ID NO: 280 - DNA, 986 bp, Homo sapiens
tgggaaagagggaaaggcttccccggccagctgcgcggcgactccggggactccagggcgcccctctgcggccgacgcccggggtgcagcggccgccggggctggggccggcgggagtccgcgggaccctccagaagagcggccggcgccgtgactcagcactggggcggagcggggcgggaccacccttataaggctcggaggccgcgaggccttcgctggagtttcgccgccgcagtcttcgccaccatgccgccctacaccgtggtctatttcccagttcgaggccgctgcgcggccctgcgcatgctgctggcagatcagggccagagctggaaggaggaggtggtgaccgtggagacgtggcaggagggctcactcaaagcctcctgcctatacgggcagctccccaagttccaggacggagacctcaccctgtaccagtccaataccatcctgcgtcacctgggccgcacccttgggctctatgggaaggaccagcaggaggcagccctggtggacatggtgaatgacggcgtggaggacctccgctgcaaatacatctccctcatctacaccaactatgaggcgggcaaggatgactatgtgaaggcactgcccgggcaactgaagccttttgagaccctgctgtcccagaaccagggaggcaagaccttcattgtgggagaccagatctccttcgctgactacaacctgctggacttgctgctgatccatgaggtcctagcccctggctgcctggatgcgttccccctgctctcagcatatgtggggcgcctcagtgcccggcccaagctcaaggccttcctggcctcccctgagtacgtgaacctccccatcaatggcaacgggaaacagtgagggttggggggactctgagcgggaggcagagtttgccttcctttctccaggaccaataaaatttctaagagagctaaaaaaaaaaaaaaaaaaaaaaaaaaaaa

SEQ ID NO: 281 - DNA, 6120 bp, Homo sapiens
cgccaggtcgcgcacagcgccccgagcccaggcgcctccccgcccccctcccgcgctccgcggcggcggcggcggcggcagcagtagcagcaatatggctgttgatgggtgtttggggtggcgctggcggcgggaggagctcccccgagcccctgcgccggctgcccgttgctagctatggcaaatggtggcggcggcggcggcggcagcagcggcggcggcggcggcggcggaggcagcagtcttagaatgagtagcaatatccacgcgaaccatctcagcctagacgcgtcctcctcctcctcctcctcctcttcctcttcttcttcttcctcctcctcttcctcctcgtcctcggtccacgagcccaagatggatgcgctcatcatcccggtgaccatggaggtgccgtgcgacagccggggccaacgcatgtggtgggctttcctggcctcctccatggtgactttcttcgggggcctcttcatcatcttgctctggcggacgctcaagtacctgtggaccgtgtgctgccactgcgggggcaagacgaaggaggcccagaagattaacaatggctcaagccaggcggatggcactctcaaaccagtggatgaaaaagaggaggcagtggccgccgaggtcggctggatgacctccgtgaaggactgggcgggggtgatgatatccgcccagacactgactggcagagtcctggttgtcttagtctttgctctcagcatcggtgcacttgtaatatacttcatagattcatcaaacccaatagaatcctgccagaatttctacaaagatttcacattacagatcgacatggctttcaacgtgttcttccttctctacttcggcttgcggtttattgcagccaacgataaattgtggttctggctggaagtgaactctgtagtggatttcttcacggtgccccccgtgtttgtgtctgtgtacttaaacagaagttggcttggtttgagatttttaagagctctgagactgatacagttttcagaaattttgcagtttctgaatattcttaaaacaagtaattccatcaagctggtgaatctgctctccatatttatcagcacgtggctgactgcagccgggttcatccatttggtggagaattcaggggacccatgggaaaatttccaaaacaaccaggctctcacctactgggaatgtgtctatttactcatggtcacaatgtccaccgttggttatggggatgtttatgcaaaaaccacacttgggcgcctcttcatggtcttcttcatcctcgggggactggccatgtttgccagctacgtccctgaaatcatagagttaataggaaaccgcaagaaatacgggggctcctatagtgcggttagtggaagaaagcacattgtggtctgcggacacatcactctggagagtgtttccaacttcctgaaggactttctgcacaaggaccgggatgacgtcaatgtggagatcgtttttcttcacaacatctcccccaacctggagcttgaagctctgttcaaacgacattttactcaggtggaattttatcagggttccgtcctcaatccacatgatcttgcaagagtcaagatagagtcagcagatgcatgcctgatccttgccaacaagtactgcgctgacccggatgcggaggatgcctcgaatatcatgagagtaatctccataaagaactaccatccgaagataagaatcatcactcaaatgctgcagtatcacaacaaggcccatctgctaaacatcccgagctggaattggaaagaaggtgatgacgcaatctgcctcgcagagttgaagttgggcttcatagcccagagctgcctggctcaaggcctctccaccatgcttgccaacctcttctccatgaggtcattcataaagattgaggaagacacatggcagaaatactacttggaaggagtctcaaatgaaatgtacacagaatatctctccagtgccttcgtgggtctgtccttccctactgtttgtgagctgtgttttgtgaagctcaagctcctaatgatagccattgagtacaagtctgccaaccgagagagccgtatattaattaatcctggaaaccatcttaagatccaagaaggtactttaggatttttcatcgcaagtgatgccaaagaagttaaaagggcatttttttactgcaaggcctgtcatgatgacatcacagatcccaaaagaataaaaaaatgtggctgcaaacggcttgaagatgagcagccgtcaacactatcaccaaaaaaaaagcaacggaatggaggcatgcggaactcacccaacacctcgcctaagctgatgaggcatgaccccttgttaattcctggcaatgatcagattgacaacatggactccaatgtgaagaagtacgactctactgggatgtttcactggtgtgcacccaaggagatagagaaagtcatcctgactcgaagtgaagctgccatgaccgtcctgagtggccatgtcgtggtctgcatctttggcgacgtcagctcagccctgatcggcctccggaacctggtgatgccgctccgtgccagcaactttcattaccatgagctcaagcacattgtgtttgtgggctctattgagtacctcaagcgggaatgggagacgcttcataacttccccaaagtgtccatattgcctggtacgccattaagtcgggctgatttaagggctgtcaacatcaacctctgtgacatgtgcgttatcctgtcagccaatcagaataatattgatgatacttcgctgcaggacaaggaatgcatcttggcgtcactcaacatcaaatctatgcagtttgatgacagcatcggagtcttgcaggctaattcccaagggttcacacctccaggaatggatagatcctctccagataacagcccagtgcacgggatgttacgtcaaccatccatcacaactggggtcaacatccccatcatcactgaactagtgaacgatactaatgttcagtttttggaccaagacgatgatgatgaccctgatacagaactgtacctcacgcagccctttgcctgtgggacagcatttgccgtcagtgtcctggactcactcatgagcgcgacgtacttcaatgacaatatcctcaccctgatacggaccctggtgaccggaggagccacgccggagctggaggctctgattgctgaggaaaacgcccttagaggtggctacagcaccccgcagacactggccaatagggaccgctgccgcgtggcccagttagctctgctcgatgggccatttgcggacttaggggatggtggttgttatggtgatctgttctgcaaagctctgaaaacatataatatgctttgttttggaatttaccggctgagagatgctcacctcagcacccccagtcagtgcacaaagaggtatgtcatcaccaacccgccctatgagtttgagctcgtgccgacggacctgatcttctgcttaatgcagtttgaccacaatgccggccagtcccgggccagcctgtcccattcctcccactcgtcgcagtcctccagcaagaagagctcctctgttcactccatcccatccacagcaaaccgacagaaccggcccaagtccagggagtcccgggacaaacagaagtacgtgcaggaagagcggctttgatatgtgtatccaccgccactgtgtgaaactgtatctgccactcatttccccagttggtgtttccaacaaagtaactttccctgttttcccctgtagtccccccctttttttttacacatatttgcatatgtatgatagtgtgcatgtggttgtcatttttatttcaccaccataaaacccttgagcacaacagcaaataagcagacggaccaaaagttatttatgattctgggggaaaaataacccaaaggcatgctccagacataaatagctcactgcaggaacgagttcacagattagaagggagcacttgtgatcaacgtcagttaggcagagcaagtttatttaatgtaaaagaaaagttgattctgatttatcaggattatcagggtgctttgggttttgattttgttgttgttgttgttttcctttctttctttttttatacacacaataagttagcacatgtttatttgaaacaagcaaccaaacagcaatgaaaacatattgattgtttccagtctctgggccgaagtattgcgaagcatttgaaaagctttcacgatttgtgtagatgattatgaaggacctgcttgttgcaagagaacatcagtgatttttttagttactcaccaaggccttttgtcccagagccagttccctctgggagttcttatgaacatttctcaccttaatatggaggagagaatagtattccaatcatggatgtatcaaattctagtcatttagtttaagtgaaaagaggtttgattgcatattaaattgttattctgtctccttatgttgccatatgaatagctattttttttctttcacttttgacatttgggatgaaaagccatatgtatcataaatatcagatgtaagtcattaaaaactgccttcctgggacttttacatcttttaaaaggtgaattacttaccttatgtacagaataaataatgctcaggaaagagcaagtatttttccatgcattctcaggggatctttttactcccctttgtttgattagttagggccccaatgccaggtaggaggaagggctggggcaatggtagagtgagaggaagacaaacccagctgcagatcatgcttttctaggagccgacatgctaaataaattagaatgtaggaggatcagccacagttgactcaacaaagacaaaagccagccaccaccttcaactgttggcacagctgtgcggtgctggctgtcccaatgcagaaagctggtgggaaggaattcctcatcatcactttctttaatgtagccaatttaggcagggtaatgacggcaatagagagctgctccttgtcattatgagacgtgggataagaagagtgcaacagtgagccaaacacattttggtatagttatttttttcttcttttgttttctttcttttttaacacttagtaagcatgagaggagaggtagaaaaatacccttttttcaacatatagttgtcagatgctttgtgcatgcaaatcatgctttaggcagtgcggtatttcttaaaaactggccaattcaccataaccaatttcccttatggatggactaggctggtatatacatatttgaaaagttttacttcaaagaattccatcgaatagaataggggtaaaagggaggaggaaaacatgtcacagctgtaccatctctaaaaaggtgtttttatggtgaatgttttggatttagattttggatcccccgtcccctcaagcatgatagttttggatatttgcttgctgtgtgaattgacaagcacttttactgacaaatggtgaggctcagtcagaacctccaccctcccccacaccaaagacaggggcagcgtagtattcaaaccagtattgtggtggggaataattgtatacatgtaaattatcaagccctatgagtggaagaattttttcaaattatttttgtccctctatatattgatttatattatgtataactatctctttatataaactatatataattatatatatataactatataattatatatatataactatatatataactatatatatgtatcccctagtattggatcatgaagagctcttcatgcattctttgcaaaggaggttataaagttacgccctcagaacatttataactataagaatgtgccagttaaagtgctcaacaggaaatatgacagtttaaaagcattgtaaaactcacatagcttacttctctctctaaagtgcaacaaggatgaatagaatgggccaaggtatgacaattaatggttctgcatgacctagccactgctgggggttttcttctataacgttgtccttgtgaaaacttttgtgaaattaaaaaaaaaggagttacaaattttaaaaaaaaaaaaaaaaaa

SEQ ID NO: 282 - DNA, 8220 bp, Homo sapiens
gaaacttcggcgtgaagtgcagctccgctccggctccctctagctttctttccttctctggaatccgaggcgcggatcttcctcgccccaccgccctagttttttcgggagctcgccggtgccctctagggtgtcggctcgtgctgggaagtgccctccatcctggtaatggggggcggcgaggcaccgtaggagtggcgaggcggcgcccagggtggcactgccccggaacggggcgctgggtgcgcgcgggagggtccccgcgcgggctccgccgctgccgcagctgcgagcgcgccgcgccaccgagcctcctgcagcaatggctcgtccgtgaaacgcgagccacggctgctctttttaagagtgcctgcatcctccgtttgcgcttcgcaactgtcctgggtgaaaatggctgtctagactaaaatgtggcagaagggaccaagcagtggatattgagcctgtgaagtccaactcttaagctccgagacctgggggactgagagcccagctctgaaaagtgcatcatgaattccggagttgccatgaaatatggaaacgactcctcggccgagctgagtgagctccattcagcagccctggcatcactaaagggagatatagtggaacttaataaacgtctccagcaaacagagagggaacgggaccttctggaaaagaaattggccaaggcacagtgcgagcagtcccacctcatgagagagcatgaggatgtccaggagcgaacgacacttcgctatgaggaacgcatcacagagctccacagcgtcattgcggagctcaacaagaagatagaccgtctgcaaggcaccaccatcagggaggaagatgagtactcagaactgcgatcagaactcagccagagccaacacgaggtcaacgaggactctcgaagcatggaccaagaccagacctctgtctctatccccgaaaaccagtctaccatggttactgctgacatggacaactgcagtgacctgaactcagaactgcagagggtgctgacagggctggagaatgttgtctgcggcaggaagaagagcagctgcagcctctccgtggccgaggtggacaggcacattgagcagctcaccacagccagcgagcactgtgacctggctattaagacagtcgaggagattgagggggtgcttggccgggacctgtatcccaacctggctgaagagaggtctcggtgggagaaggagctggctgggctgagggaagagaatgagagcctgactgccatgctgtgcagcaaagaggaagaactgaaccggactaaggccaccatgaatgccatccgggaagagcgggaccggctccggaggagggtcagagagcttcaaactcgactacagagcgtgcaggccacaggtccctccagccctggccgcctcacttccaccaaccgcccgattaaccccagcactggggagctgagcacaagcagcagcagcaatgacattcccatcgccaagattgctgagagggtgaagctatcaaagacaaggtccgaatcgtcatcatctgatcggccagtcctgggctcagaaatcagtagcataggggtatccagcagtgtggctgaacacctggcccactcacttcaggactgctccaatatccaagagattttccaaacactctactcacacggatctgccatctcagaaagcaagattagagagtttgaggtggaaacagaacggctgaatagccggattgagcacctcaaatcccaaaatgacctcctgaccataaccttggaggaatgtaaaagcaatgccgagaggatgagcatgctggtgggaaaatacgaatccaatgccacagcgctgaggctggccttgcagtacagcgagcagtgcatcgaagcctacgaactcctcctggcgctggcagagagtgagcagagcctcatcctggggcagttccgagcggcgggcgtggggtcctcccctggagaccagtcgggggatgaaaacatcactcagatgctcaagcgagctcatgactgccggaagacagctgagaacgctgccaaggccctgctcatgaagctggacggcagctgtgggggagcctttgccgtggccggctgcagcgtgcagccctgggagagcctttcctccaacagccacaccagcacaaccagctccacagccagtagttgcgacaccgagttcactaaagaagacgagcagaggctgaaggattatatccagcagctcaagaatgacagggctgcggtcaagctgaccatgctggagctggaaagcatccacatcgatcctctcagctatgacgtcaagcctcggggagacagccagaggctggatctggaaaacgcagtgcttatgcaggagctcatggccatgaaggaggagatggccgagttgaaggcccagctctacctactggagaaagagaagaaggccctggagctgaagctgagcacgcgggaggcccaggagcaggcctacctggtgcacattgagcacctgaagtccgaggtggaggagcagaaggagcagcggatgcgatccctcagctccaccagcagcggcagcaaagacaaacctggcaaggagtgtgctgatgctgcctccccagctctgtccctagccgaactcaggacaacgtgcagcgagaatgagctggctgcggagttcaccaacgccattcgtcgagaaaagaagttgaaggccagagttcaagagctggtgagtgccttggagagactcaccaagagcagtgaaatccgacatcagcaatctgcagagttcgtgaatgatctaaagcgggccaacagcaacctggtggctgcctatgagaaagcaaagaaaaagcatcaaaacaaactgaagaagttagagtcgcagatgatggccatggtggagagacatgagacccaagtgaggatgctcaagcaaagaatagctctgctagaggaggagaactccaggccacacaccaatgaaacttcgctttaatcagcactcacgcaccggagttctgcccatgggaagtaaactgcagcaggccactggggacagaagggcccatgtacttgttgggaggaggaggaaagggaaggctggcaggtaggtcggcacttggacaatggagtgccccaactcaacccttggggcgactggccatggtgacattgtggactgtatccagaggtgcccgctcttccctcctgggcccacaacagcgtgtaaacacatgttctgtgcctgctcagcagagcctcgtttctgctttcagcactcactctccccctcctcttctggtctggcggctgtgcatcagtgggatcccagacatttgtttctgtaagattttccattgtatcctctttttggtagatgctgggctcatcttctagaatctcgtttctcctctttcctcctgcttcatgggaaaacagacctgtgtgtgcctccagcatttaaaaggactgctgatttgtttactacagcaaggctttggtttccaagtcccgggtctcaactttaagatagaggcggccataagaggtgatctctgggagttataggtcatgggaagagcgtagacaggtgttacttacagtcccagatacactaaagttacaaacagaccaccaccaggactgtgcctgaacaattttgtattgagagaataaaaacttccttcaatcttcattttggaggcagggctgggaagggagcgctctcttgattctgggatttctccctctcagtggagccttattaatatccaagacttagagctgggaatctttttgatacctgtagtggaactaaaattctgtcaggggtttcttcaagagctgagaaacattattagcacttcccgccccagggcactacataattgctgttctgctgaatcaaatctcttccacatgggtgcatttgtagctctggacctgtctctacctaaggacaagacactgaggagatactgaacattttgcaaaacttatcacgcctacttaagagtgctgtgtaacccccagttcaagacttagctcctgttgtcatgacggggacagagtgagggaatggtagttaaggcttcttttttgcccccagatacatggtgatggttagcatatggtgcttaaaaggttaaatttcaagcaaaatgcttacagggctaggcagtaccaaagtaactgaattatttcaggaaggtcttcaatcttaaaacaaattcattattctttttcagttttacctcttctctctcagttctacactgatacacttgaaggaccatttactgtttttttctgtagcaccagagaatccatccaaagttccctatgaaaaatgtgttccattgccatagctgactacaaattaaagttgaggaggtttctgcatagagtctttatgtccataagctacgggtaggtctattttcagagcatgatacaaattccacagccttctgttcgctggaggatactccagccaccagttcggagggcagacagctgtatcctaaaagcaaccactgagaggccagcagtgaggctgcccatctccaaaacgaaacaacagatcaactggtatcagtctagaaggaccagctttggggtgctttgatcactatgaaaatgttcactggtttctgtcaatcatttggtcaaagttagttcctgtgattttttttttttttttttgagatggagttttgctcgtcaccaggctgaagtgcagtggcgtgatcttggctcactgcaacctctgcctcctgagtagctggaattacaggtgcccgccaccatacccagctagtttttttgtatttttagtagagacagggtttcaccatgttggccaggctggtctcgaactcctgaccactgatccacccacctcggcctcccaaagtgctgggattacaggcatgagccaatgtgcctggccattcctgtgattttttagaatttttcacttttcatataaagttgcattttatcatgaggaaaatgttttggctgaaaaacatatgccccaaaaaaaaaaaaatcagttttcactatttttccagcttgcctagggaaacgtcctcccctgagcaaagtgggatgtgcatggctcttttttgtgattaagcaggcatcaaatgggcagttttcattttcactgacacagaaacatgtggctgaagcaggaataaaatcctgcctactgacttctgtctccattcttgctccaggtaaaatcagagaacctccccttctctgagaattcccccaggcagaggcggctccagctcctgttaagggccccagttttactcatgctacctgaccttagttttagtactttcaaatgtgatttgggtaaaaactattttgcaggcaaaagtgttaattttttataaatatgtataataaaaaagctataaaagtttttccttttcttgtatttttcaaatactccccaagacacaatccttgaaggtgaactaggtggcacttgattatgctaattgtgggagctactgaactaaactatactgattaaattaaatgcttgcaggttcctgggtaattttcctttgtgaataacctggcgctacctgaatttttctctaacaaacatctccaatgagggtaaacaatgatcttgattctaatttatatgaggttaaaaaccttcagatttcgtattttgaattgttctccctagtttcctcagtggttacccccttttagtcagtaaccatctctgttcagaattcagtctttggcttttgaagaaatgggcacagagccaaaggacccatttcacagttcccttggaatatatttcccattgttggactgaggcaaacaaaaccaactgtgcaaatcacaagcaaaagagacttctgtccgtagttgcgagtgccatcagtgtgagcttaccagctacaaaaatctgtcatggactggggaacagtatgattccttattgaaactttcatcctcatcggctggcttgtcagcgttctgaagttaatatccatgctgcctgaaacaaatgttatgtttaactagcacttaacttttaaaattgcttaattctcctttcagatgcatgcactaagtcttctctgagcctgcagcaatattttagagggacctcttctaagtcagagccttgacattctactccaaaaggaagtccaaattagagcccataggctttttcttaaaagctgttaaggagtagtaaagaaagttaccactctaaggaaaacatgaaactatctgaaagtcttctggttcctaactggatacagattagattattttaaatgagaaaaaagtgcaccgtagttacccgatcaagattggactgcctgtgtccctggcatgaattaaagaacctccatagttgcttgttcccttctgaaggtgtttcctatggcccacgagaattataaagcaatcactttttaagtctatcagtcaaccttaatagctctcaagagtttcgattatcaagctttaaagtgataacatatcaagatgactattaaaaaataaacatctctgaaagtgtcctttcctccataaggctttaaacaatttgcaaattcttaattgggagtatgtcccaatcattctattaaactatttacagctctacctacttctagattcagcaaacagagctactagttagagtattttgagagccaaaatagtaagagacttctgtaatggttgagatttctgcactgaccttaattagggtaccgccatagggctaccaaagtttttagtgagggctggggaggtggagcataagtaacattttttttctgcagaaggtgatggctttgtagaacactataaaatttttcaggaaaacatacagcaaattttcttatccagtgggaacagcctatttgacaaggaatgatatacaagtttgattcacctttgagcactcttatagagtttacagaagaggcgtaactggttacaaaacaaaagttacgccttcactatccagttcttaaagtttatccacatcctacaaatcttatgttcatgtaggtcaggttaaagtaagctccaaacttgtggccttcagaagcatctcctgtttaacacacctgaaattactctaacttaatacatttgtattctctaagaaataatgctgactgctgtcaccacagcatcactgatctctcagtggctgttaaaatataaacaagtggaaaaaaagtatacaagttgatagcagctgttcatgtattcttgttttgctaatacctgtgtagagaaagacagtttcacatgcagatcaccatacatttttgcttaaaggttacactgggtaaactgtttgtttatcacattacatctgggtgagattttgcatgtgaccaagaggaagaaatcattcagtcccggaaatagcaactgctatgtaaaaccacatccttgactagtacttcatctttccacagtcatccatctgctaatcaggtgaaatatcagctcagcagaacaaagcaagttatacacaaatttcccccacattcacactgatgccgtacttagtaattctggttctaccattcccttttgcactttttgcaagtcaaattcatgtggaaaaatgttctgtttgtagaactcatagtattcacttatagtgctcatgtcaggaatggcaagtgagtaagagcccctgataatctgcttttgttagaacgtaatgcaaagataataaaacatgtccacttcttttctagttctaatcagtttttagacatcaagatttatttactttgcatgagatttgtttcctattatttgaatatgtgctatacacttgaattagaaaaacctgcttgaatgtattgtcagttattaaagcacatgtgactaagtttgcatttgtcagtattgttctactgtttgtactgaaagtctcattttaaaattgctacttaacactgtactataccttgtaattttttagattctccacttgtattctttaaatgtttccagatgcctttagttttagctgctgtaaaatagctactttgcgttatttgatatagaattgttttttaaaaactccatttatttatacagagacatttataatattttacaaacattcttatattctgaataaatatttctaattccacagt

SEQ ID NO: 283 - DNA, 6882 bp, Homo sapiens
gggagatttggacgctccggcctgggaggtgcgtcagatccgagctcgccatccagtttcctctccactagtccccccagttggagatctgggaccaacaaggcaccatggcgcagaagggccaactcagtgacgatgagaagttcctctttgtggacaaaaacttcatcaacagcccagtggcccaggctgactgggccgccaagagactcgtctgggtcccctcggagaagcagggcttcgaggcagccagcattaaggaggagaagggggatgaggtggttgtggagctggtggagaatggcaagaaggtcacggttgggaaagatgacatccagaagatgaacccacccaagttctccaaggtggaggacatggcggagctgacgtgcctcaacgaagcctccgtgctacacaacctgagggagcggtacttctcagggctaatatatacgtactctggcctcttctgcgtggtggtcaacccctataaacacctgcccatctactcggagaagatcgtcgacatgtacaagggcaagaagaggcacgagatgccgcctcacatctacgccatcgcagacacggcctaccggagcatgcttcaagatcgggaggaccagtccattctatgcacaggcgagtctggagccgggaaaaccgaaaacaccaagaaggtcattcagtacctggccgtggtggcctcctcccacaagggcaagaaagacacaagtatcacgggagagctggaaaagcagcttctacaagcaaacccgattctggaggctttcggcaacgccaaaacagtgaagaacgacaactcctcacgattcggcaaattcatccgcatcaacttcgacgtcacgggttacatcgtgggagccaacattgagacctatctgctagaaaaatcacgggcaattcgccaagccagagacgagaggacattccacatcttttactacatgattgctggagccaaggagaagatgagaagtgacttgcttttggagggcttcaacaactacaccttcctctccaatggctttgtgcccatcccagcagcccaggatgatgagatgttccaggaaaccgtggaggccatggcaatcatgggtttcagcgaggaggagcagctatccatattgaaggtggtatcatcggtcctgcagcttggaaatatcgtcttcaagaaggaaagaaacacagaccaggcgtccatgccagataacacagctgctcagaaagtttgccacctcatgggaattaatgtgacagatttcaccagatccatcctcactcctcgtatcaaggttgggcgagatgtggtacagaaagctcagacaaaagaacaggctgactttgctgtagaggctttggccaaggcaacatatgagcgccttttccgctggatactcacccgcgtgaacaaagccctggacaagacccatcggcaaggggcttccttcctggggatcctggatatagctggatttgagatctttgaggtgaactccttcgagcagctgtgcatcaactacaccaacgagaagctgcagcagctcttcaaccacaccatgttcatcctggagcaggaggagtaccagcgcgagggcatcgagtggaacttcatcgactttgggctggacctacagccctgcatcgagctcatcgagcgaccgaacaaccctccaggtgtgctggccctgctggacgaggaatgctggttccccaaagccacggacaagtctttcgtggagaagctgtgcacggagcagggcagccaccccaagttccagaagcccaagcagctcaaggacaagactgagttctccatcatccattatgctgggaaggtggactataatgcgagtgcctggctgaccaagaatatggacccgctgaatgacaacgtgacttccctgctcaatgcctcctccgacaagtttgtggccgacctgtggaaggacgtggaccgcatcgtgggcctggaccagatggccaagatgacggagagctcgctgcccagcgcctccaagaccaagaagggcatgttccgcacagtggggcagctgtacaaggagcagctgggcaagctgatgaccacgctacgcaacaccacgcccaacttcgtgcgctgcatcatccccaaccacgagaagaggtccggcaagctggatgcgttcctggtgctggagcagctgcggtgcaatggggtgctggaaggcattcgcatctgccggcagggcttccccaaccggatcgtcttccaggagttccgccaacgctacgagatcctggcggcgaatgccatccccaaaggcttcatggacgggaagcaggcctgcattctcatgatcaaagccctggaacttgaccccaacttatacaggatagggcagagcaaaatcttcttccgaactggcgtcctggcccacctagaggaggagcgagatttgaagatcaccgatgtcatcatggccttccaggcgatgtgtcgtggctacttggccagaaaggcttttgccaagaggcagcagcagctgaccgccatgaaggtgattcagaggaactgcgccgcctacctcaagctgcggaactggcagtggtggaggcttttcaccaaagtgaagccactgctgcaggtgacacggcaggaggaggagatgcaggccaaggaggatgaactgcagaagaccaaggagcggcagcagaaggcagagaatgagcttaaggagctggaacagaagcactcgcagctgaccgaggagaagaacctgctacaggaacagctgcaggcagagacagagctgtatgcagaggctgaggagatgcgggtgcggctggcggccaagaagcaggagctggaggagatactgcatgagatggaggcccgcctggaggaggaggaagacaggggccagcagctacaggctgaaaggaagaagatggcccagcagatgctggaccttgaagaacagctggaggaggaggaagctgccaggcagaagctgcaacttgagaaggtcacggctgaggccaagatcaagaaactggaggatgagatcctggtcatggatgatcagaacaataaactatcaaaagaacgaaaactccttgaggagaggattagtgacttaacgacaaatcttgcagaagaggaagaaaaggccaagaatcttaccaagctgaaaaacaagcatgaatctatgatttcagaactggaagtgcggctaaagaaggaagagaagagccgacaggagctggagaagctgaaacggaagctggagggtgatgccagcgacttccacgagcagatcgctgacctccaggcgcagatcgcagagctcaagatgcagctggccaagaaggaggaggagctgcaggcggccctggccaggcttgacgatgaaatcgctcagaagaacaatgccctgaagaagatccgggagctggagggccacatctcagacctccaggaggacctggactcagagcgggccgccaggaacaaggctgaaaagcagaagcgagacctcggcgaggagctggaggccctaaagacagagctggaagacacactggacagcacagccactcagcaggagctcagggccaagagggagcaggaggtgacggtgctgaagaaggccctggatgaagagacgcggtcccatgaggctcaggtccaggagatgaggcagaaacacgcacaggcggtggaggagctcacagagcagcttgagcagttcaagagggccaaggcgaacctagacaagaataagcagacgctggagaaagagaacgcagacctggccggggagctgcgggtcctgggccaggccaagcaggaggtggaacataagaagaagaagctggaggcgcaggtgcaggagctgcagtccaagtgcagcgatggggagcgggcccgggcggagctcaatgacaaagtccacaagctgcagaatgaagttgagagcgtcacagggatgcttaacgaggccgaggggaaggccattaagctggccaaggacgtggcgtccctcagttcccagctccaggacacccaggagctgcttcaagaagaaacccggcagaagctcaacgtgtctacgaagctgcgccagctggaggaggagcggaacagcctgcaagaccagctggacgaggagatggaggccaagcagaacctggagcgccacatctccactctcaacatccagctctccgactcgaagaagaagctgcaggactttgccagcaccgtggaagctctggaagaggggaagaagaggttccagaaggagatcgagaacctcacccagcagtacgaggagaaggcggccgcttatgataaactggaaaagaccaagaacaggcttcagcaggagctggacgacctggttgttgatttggacaaccagcggcaactcgtgtccaacctggaaaagaagcagaggaaatttgatcagttgttagccgaggagaaaaacatctcttccaaatacgcggatgagagggacagagctgaggcagaagccagggagaaggaaaccaaggccctgtccctggctcgggcccttgaagaggccttggaagccaaagaggaactcgagcggaccaacaaaatgctcaaagccgaaatggaagacctggtcagctccaaggatgacgtgggcaagaacgtccatgagctggagaagtccaagcgggccctggagacccagatggaggagatgaagacgcagctggaagagctggaggacgagctgcaagccacggaggacgccaaactgcggctggaagtcaacatgcaggcgctcaagggccagttcgaaagggatctccaagcccgggacgagcagaatgaggagaagaggaggcaactgcagagacagcttcacgagtatgagacggaactggaagacgagcgaaagcaacgtgccctggcagctgcagcaaagaagaagctggaaggggacctgaaagacctggagcttcaggccgactctgccatcaaggggagggaggaagccatcaagcagctacgcaaactgcaggctcagatgaaggactttcaaagagagctggaagatgcccgtgcctccagagatgagatctttgccacagccaaagagaatgagaagaaagccaagagcttggaagcagacctcatgcagctacaagaggacctcgccgccgctgagagggctcgcaaacaagcggacctcgagaaggaggaactggcagaggagctggccagtagcctgtcgggaaggaacgcactccaggacgagaagcgccgcctggaggcccggatcgcccagctggaggaggagctggaggaggagcagggcaacatggaggccatgagcgaccgggtccgcaaagccacacagcaggccgagcagctcagcaacgagctggccacagagcgcagcacggcccagaagaatgagagtgcccggcagcagctcgagcggcagaacaaggagctccggagcaagctccacgagatggagggggccgtcaagtccaagttcaagtccaccatcgcggcgctggaggccaagattgcacagctggaggagcaggtcgagcaggaggccagagagaaacaggcggccaccaagtcgctgaagcagaaagacaagaagctgaaggaaatcttgctgcaggtggaggacgagcgcaagatggccgagcagtacaaggagcaggcagagaaaggcaatgccagggtcaagcagctcaagaggcagctggaggaggcagaggaggagtcccagcgcatcaacgccaaccgcaggaagctgcagcgggagctggatgaggccacggagagcaacgaggccatgggccgcgaggtgaacgcactcaagagcaagctcaggcgaggaaacgagacctctttcgttccttctagaaggtctggaggacgtagagttattgaaaatgcagatggttctgaggaggaaacggacactcgagacgcagacttcaatggaaccaaggccagtgaataagcaactttctacagttttgcaccacggcaagaaaaccaaaaaccaaaacaaacaaacaaaaaaaacccaacaacaacccagaacaaagcaaaacccagcagactgtacttagcattgtctaaatccattctcaaattccaaatatcacagacacccctcacacaaggaatataaaaaccaccaccctccagcctgggcaacgtagtaaaacctcatctatacaagaatttaaaaataagctgggcgtggtggtacacacctgtggtcccagctactagggaggctgagccaggaagaacgctccagcccaggacttcgaggctgcaatgagctataattgcatcattgcactccagcctgggcaacagagaccctgtctcaaccaccaccaccaccaccacccctactacccctgtattcaaggtaaaaattgaagtttgtatgatgtaagagatgagaaaaacccaacaggaaacacagacacatcctccagttctatcaatggattgtgcagacactgagtttttagaaaaacatatccacggtaaccggtccctggcaattctgtttacatgaaatggggagaaagtcaccgaaatgggtgccgccggcccccactcccaattcattccctaacctgcaaacctttccaacttctcacgtcaggcctttgagaattctttccccctctcctggtttccacacctcagacacgcacagttcaccaagtgccttctgtagtcacatgaattgaaaaggagacgctgctcccacggaggggagcaggaatgctgcactgtttacaccctgactgtgcttaaaaacactttcactaataaatggttataaatcacaa

SEQ ID NO: 284 - DNA, 6921 bp, Homo sapiens
gggagatttggacgctccggcctgggaggtgcgtcagatccgagctcgccatccagtttcctctccactagtccccccagttggagatctgggaccaacaaggcaccatggcgcagaagggccaactcagtgacgatgagaagttcctctttgtggacaaaaacttcatcaacagcccagtggcccaggctgactgggccgccaagagactcgtctgggtcccctcggagaagcagggcttcgaggcagccagcattaaggaggagaagggggatgaggtggttgtggagctggtggagaatggcaagaaggtcacggttgggaaagatgacatccagaagatgaacccacccaagttctccaaggtggaggacatggcggagctgacgtgcctcaacgaagcctccgtgctacacaacctgagggagcggtacttctcagggctaatatatacgtactctggcctcttctgcgtggtggtcaacccctataaacacctgcccatctactcggagaagatcgtcgacatgtacaagggcaagaagaggcacgagatgccgcctcacatctacgccatcgcagacacggcctaccggagcatgcttcaagatcgggaggaccagtccattctatgcacaggcgagtctggagccgggaaaaccgaaaacaccaagaaggtcattcagtacctggccgtggtggcctcctcccacaagggcaagaaagacacaagtatcacgggagagctggaaaagcagcttctacaagcaaacccgattctggaggctttcggcaacgccaaaacagtgaagaacgacaactcctcacgattcggcaaattcatccgcatcaacttcgacgtcacgggttacatcgtgggagccaacattgagacctatctgctagaaaaatcacgggcaattcgccaagccagagacgagaggacattccacatcttttactacatgattgctggagccaaggagaagatgagaagtgacttgcttttggagggcttcaacaactacaccttcctctccaatggctttgtgcccatcccagcagcccaggatgatgagatgttccaggaaaccgtggaggccatggcaatcatgggtttcagcgaggaggagcagctatccatattgaaggtggtatcatcggtcctgcagcttggaaatatcgtcttcaagaaggaaagaaacacagaccaggcgtccatgccagataacacagctgctcagaaagtttgccacctcatgggaattaatgtgacagatttcaccagatccatcctcactcctcgtatcaaggttgggcgagatgtggtacagaaagctcagacaaaagaacaggctgactttgctgtagaggctttggccaaggcaacatatgagcgccttttccgctggatactcacccgcgtgaacaaagccctggacaagacccatcggcaaggggcttccttcctggggatcctggatatagctggatttgagatctttgaggtgaactccttcgagcagctgtgcatcaactacaccaacgagaagctgcagcagctcttcaaccacaccatgttcatcctggagcaggaggagtaccagcgcgagggcatcgagtggaacttcatcgactttgggctggacctacagccctgcatcgagctcatcgagcgaccgaacaaccctccaggtgtgctggccctgctggacgaggaatgctggttccccaaagccacggacaagtctttcgtggagaagctgtgcacggagcagggcagccaccccaagttccagaagcccaagcagctcaaggacaagactgagttctccatcatccattatgctgggaaggtggactataatgcgagtgcctggctgaccaagaatatggacccgctgaatgacaacgtgacttccctgctcaatgcctcctccgacaagtttgtggccgacctgtggaaggacgtggaccgcatcgtgggcctggaccagatggccaagatgacggagagctcgctgcccagcgcctccaagaccaagaagggcatgttccgcacagtggggcagctgtacaaggagcagctgggcaagctgatgaccacgctacgcaacaccacgcccaacttcgtgcgctgcatcatccccaaccacgagaagaggtccggcaagctggatgcgttcctggtgctggagcagctgcggtgcaatggggtgctggaaggcattcgcatctgccggcagggcttccccaaccggatcgtcttccaggagttccgccaacgctacgagatcctggcggcgaatgccatccccaaaggcttcatggacgggaagcaggcctgcattctcatgatcaaagccctggaacttgaccccaacttatacaggatagggcagagcaaaatcttcttccgaactggcgtcctggcccacctagaggaggagcgagatttgaagatcaccgatgtcatcatggccttccaggcgatgtgtcgtggctacttggccagaaaggcttttgccaagaggcagcagcagctgaccgccatgaaggtgattcagaggaactgcgccgcctacctcaagctgcggaactggcagtggtggaggcttttcaccaaagtgaagccactgctgcaggtgacacggcaggaggaggagatgcaggccaaggaggatgaactgcagaagaccaaggagcggcagcagaaggcagagaatgagcttaaggagctggaacagaagcactcgcagctgaccgaggagaagaacctgctacaggaacagctgcaggcagagacagagctgtatgcagaggctgaggagatgcgggtgcggctggcggccaagaagcaggagctggaggagatactgcatgagatggaggcccgcctggaggaggaggaagacaggggccagcagctacaggctgaaaggaagaagatggcccagcagatgctggaccttgaagaacagctggaggaggaggaagctgccaggcagaagctgcaacttgagaaggtcacggctgaggccaagatcaagaaactggaggatgagatcctggtcatggatgatcagaacaataaactatcaaaagaacgaaaactccttgaggagaggattagtgacttaacgacaaatcttgcagaagaggaagaaaaggccaagaatcttaccaagctgaaaaacaagcatgaatctatgatttcagaactggaagtgcggctaaagaaggaagagaagagccgacaggagctggagaagctgaaacggaagctggagggtgatgccagcgacttccacgagcagatcgctgacctccaggcgcagatcgcagagctcaagatgcagctggccaagaaggaggaggagctgcaggcggccctggccaggcttgacgatgaaatcgctcagaagaacaatgccctgaagaagatccgggagctggagggccacatctcagacctccaggaggacctggactcagagcgggccgccaggaacaaggctgaaaagcagaagcgagacctcggcgaggagctggaggccctaaagacagagctggaagacacactggacagcacagccactcagcaggagctcagggccaagagggagcaggaggtgacggtgctgaagaaggccctggatgaagagacgcggtcccatgaggctcaggtccaggagatgaggcagaaacacgcacaggcggtggaggagctcacagagcagcttgagcagttcaagagggccaaggcgaacctagacaagaataagcagacgctggagaaagagaacgcagacctggccggggagctgcgggtcctgggccaggccaagcaggaggtggaacataagaagaagaagctggaggcgcaggtgcaggagctgcagtccaagtgcagcgatggggagcgggcccgggcggagctcaatgacaaagtccacaagctgcagaatgaagttgagagcgtcacagggatgcttaacgaggccgaggggaaggccattaagctggccaaggacgtggcgtccctcagttcccagctccaggacacccaggagctgcttcaagaagaaacccggcagaagctcaacgtgtctacgaagctgcgccagctggaggaggagcggaacagcctgcaagaccagctggacgaggagatggaggccaagcagaacctggagcgccacatctccactctcaacatccagctctccgactcgaagaagaagctgcaggactttgccagcaccgtggaagctctggaagaggggaagaagaggttccagaaggagatcgagaacctcacccagcagtacgaggagaaggcggccgcttatgataaactggaaaagaccaagaacaggcttcagcaggagctggacgacctggttgttgatttggacaaccagcggcaactcgtgtccaacctggaaaagaagcagaggaaatttgatcagttgttagccgaggagaaaaacatctcttccaaatacgcggatgagagggacagagctgaggcagaagccagggagaaggaaaccaaggccctgtccctggctcgggcccttgaagaggccttggaagccaaagaggaactcgagcggaccaacaaaatgctcaaagccgaaatggaagacctggtcagctccaaggatgacgtgggcaagaacgtccatgagctggagaagtccaagcgggccctggagacccagatggaggagatgaagacgcagctggaagagctggaggacgagctgcaagccacggaggacgccaaactgcggctggaagtcaacatgcaggcgctcaagggccagttcgaaagggatctccaagcccgggacgagcagaatgaggagaagaggaggcaactgcagagacagcttcacgagtatgagacggaactggaagacgagcgaaagcaacgtgccctggcagctgcagcaaagaagaagctggaaggggacctgaaagacctggagcttcaggccgactctgccatcaaggggagggaggaagccatcaagcagctacgcaaactgcaggctcagatgaaggactttcaaagagagctggaagatgcccgtgcctccagagatgagatctttgccacagccaaagagaatgagaagaaagccaagagcttggaagcagacctcatgcagctacaagaggacctcgccgccgctgagagggctcgcaaacaagcggacctcgagaaggaggaactggcagaggagctggccagtagcctgtcgggaaggaacgcactccaggacgagaagcgccgcctggaggcccggatcgcccagctggaggaggagctggaggaggagcagggcaacatggaggccatgagcgaccgggtccgcaaagccacacagcaggccgagcagctcagcaacgagctggccacagagcgcagcacggcccagaagaatgagagtgcccggcagcagctcgagcggcagaacaaggagctccggagcaagctccacgagatggagggggccgtcaagtccaagttcaagtccaccatcgcggcgctggaggccaagattgcacagctggaggagcaggtcgagcaggaggccagagagaaacaggcggccaccaagtcgctgaagcagaaagacaagaagctgaaggaaatcttgctgcaggtggaggacgagcgcaagatggccgagcagtacaaggagcaggcagagaaaggcaatgccagggtcaagcagctcaagaggcagctggaggaggcagaggaggagtcccagcgcatcaacgccaaccgcaggaagctgcagcgggagctggatgaggccacggagagcaacgaggccatgggccgcgaggtgaacgcactcaagagcaagctcagagggccccccccacaggaaacttcgcagtgatgcaccaggcgaggaaacgagacctctttcgttccttctagaaggtctggaggacgtagagttattgaaaatgcagatggttctgaggaggaaacggacactcgagacgcagacttcaatggaaccaaggccagtgaataagcaactttctacagttttgcaccacggcaagaaaaccaaaaaccaaaacaaacaaacaaaaaaaacccaacaacaacccagaacaaagcaaaacccagcagactgtacttagcattgtctaaatccattctcaaattccaaatatcacagacacccctcacacaaggaatataaaaaccaccaccctccagcctgggcaacgtagtaaaacctcatctatacaagaatttaaaaataagctgggcgtggtggtacacacctgtggtcccagctactagggaggctgagccaggaagaacgctccagcccaggacttcgaggctgcaatgagctataattgcatcattgcactccagcctgggcaacagagaccctgtctcaaccaccaccaccaccaccacccctactacccctgtattcaaggtaaaaattgaagtttgtatgatgtaagagatgagaaaaacccaacaggaaacacagacacatcctccagttctatcaatggattgtgcagacactgagtttttagaaaaacatatccacggtaaccggtccctggcaattctgtttacatgaaatggggagaaagtcaccgaaatgggtgccgccggcccccactcccaattcattccctaacctgcaaacctttccaacttctcacgtcaggcctttgagaattctttccccctctcctggtttccacacctcagacacgcacagttcaccaagtgccttctgtagtcacatgaattgaaaaggagacgctgctcccacggaggggagcaggaatgctgcactgtttacaccctgactgtgcttaaaaacactttcactaataaatggttataaatcacaa

SEQ ID NO: 285 - DNA, 566 bp, Homo sapiens
gccagaaccggtggagcagcgacccctgagcagtgttctctgtgctgagcggcgggactgagctgttgagttagagccaacatgagtgagcgacaaggtgctggggcaaccaatggaaaagacaagacatctggtgaaaatgatggacagaagaaagttcaagaagaatttgacattgacatggatgcaccagagacagaacgtgcagcggtggccattcagtctcagttcagaaaattccagaagaagaaggctgggtctcagtcctagtgggagaaccccctcctagtccacctgaaaacaccaaattcaaccatcatctgtcaagaaattaaaagaacaacaccctagagagaagtcatccacacacaatccacacacgcatagcaaacctccaatgcatgtacagaaacctgtgatatttatacccttgtaggaaggtatagacaatggaattgtgagtagcttaatctctatgtttctctccattttcattcctcctgcaactattttccttgatgttgtaataaaatgaagttacgatgagtgaattcaaaaaaaaaaaa

SEQ ID NO: 286 - DNA, 2090 bp, Homo sapiens
gccagcagctgcagctcggcctctgctgcctgccggtgctcttcgtggctctgggcatggcctcggaccccatcttcacgctggcgcccccgctgcattgccactacggggccttcccccctaatgcctctggctgggagcagcctcccaatgccagcggcgtcagcgtcgccagcgctgccctagcagccagcgccgccagccgtgtcgccaccagtaccgacccctcgtgcagcggcttcgccccgccggacttcaaccattgcctcaaggattgggactataatggccttcctgtgctcaccaccaacgccatcggccagtgggatctggtgtgtgacctgggctggcaggtgatcctggagcagatcctcttcatcttgggctttgcctccggctacctgttcctgggttaccccgcagacagatttggccgtcgcgggattgtgctgctgaccttggggctggtgggcccctgtggagtaggaggggctgctgcaggctcctccacaggcgtcatggccctccgattcctcttgggctttctgcttgccggtgttgacctgggtgtctacctgatgcgcctggagctgtgcgacccaacccagaggcttcgggtggccctggcaggggagttggtgggggtgggagggcacttcctgttcctgggcctggcccttgtctctaaggattggcgattcctacagcgaatgatcaccgctccctgcatcctcttcctgttttatggctggcctggtttgttcctggagtccgcacggtggctgatagtgaagcggcagattgaggaggctcagtctgtgctgaggatcctggctgagcgaaaccggccccatgggcagatgctgggggaggaggcccaggaggccctgcaggacctggagaatacctgccctctccctgcaacatcctccttttcctttgcttccctcctcaactaccgcaacatctggaaaaatctgcttatcctgggcttcaccaacttcattgcccatgccattcgccactgctaccagcctgtgggaggaggagggagcccatcggacttctacctgtgctctctgctggccagcggcaccgcagccctggcctgtgtcttcctgggggtcaccgtggaccgatttggccgccggggcatccttcttctctccatgacccttaccggcattgcttccctggtcctgctgggcctgtgggattgtgagcatcctatcttccccacagtgtgggctcaacaagggaaccccaacagagatctgaacgaggctgccatcaccactttctctgtccttgggctcttctcctcccaagctgccgccatcctcagcaccctccttgctgctgaggtcatccccaccactgtccggggccgtggcctgggcctgatcatggctctaggggcgcttggaggactgagcggcccggcccagcgcctccacatgggccatggagccttcctgcagcacgtggtgctggcggcctgcgccctcctctgcattctcagcattatgctgctgccggagaccaagcgcaagctcctgcccgaggtgctccgggacggggagctgtgtcgccggccttccctgctgcggcagccaccccctacccgctgtgaccacgtcccgctgcttgccacccccaaccctgccctctgagcggcctctgagtaccctggcgggaggctggcccacacagaaaggtggcaagaagatcgggaagactgagtagggaaggcagggctgcccagaagtctcagaggcacctcacgccagccatcgcggagagctcagagggccgtccccaccctgcctcctccctgctgctttgcattcacttccttggccagagtcaggggacagggagagagctccacactgtaaccactgggtctgggctccatcctgcgcccaaagacatccacccagacctcattatttcttgctctatcattctgtttcaataaagacatttggaataaacgagcaaaaaaaaaaaaaaaaaaaaaaaaaaaaaaaaaaaaaaaaaaaaaaaaaaaaaaaaaaaaaaaaaaaaaaaaaaaaaaaaaaaaaaaa

SEQ ID NO: 287 - DNA, 2989 bp, Homo sapiens
ggggggagcgcgccgggcgcagggagctgagtggacggctcgagacggcggcgcgtgcagcagctccagaaagcagcgagttggcagagcagggctgcatttccagcaggagctgcgagcacagtgctggctcacaacaagatgctcaaggtgtcagccgtactgtgtgtgtgtgcagccgcttggtgcagtcagtctctcgcagctgccgcggcggtggctgcagccggggggcggtcggacggcggtaattttctggatgataaacaatggctcaccacaatctctcagtatgacaaggaagtcggacagtggaacaaattccgagacgaagtagaggatgattatttccgcacttggagtccaggaaaacccttcgatcaggctttagatccagctaaggatccatgcttaaagatgaaatgtagtcgccataaagtatgcattgctcaagattctcagactgcagtctgcattagtcaccggaggcttacacacaggatgaaagaagcaggagtagaccataggcagtggaggggtcccatattatccacctgcaagcagtgcccagtggtctatcccagccctgtttgtggttcagatggtcatacctactcttttcagtgcaaactagaatatcaggcatgtgtcttaggaaaacagatctcagtcaaatgtgaaggacattgcccatgtccttcagataagcccaccagtacaagcagaaatgttaagagagcatgcagtgacctggagttcagggaagtggcaaacagattgcgggactggttcaaggcccttcatgaaagtggaagtcaaaacaagaagacaaaaacattgctgaggcctgagagaagcagattcgataccagcatcttgccaatttgcaaggactcacttggctggatgtttaacagacttgatacaaactatgacctgctattggaccagtcagagctcagaagcatttaccttgataagaatgaacagtgtaccaaggcattcttcaattcttgtgacacatacaaggacagtttaatatctaataatgagtggtgctactgcttccagagacagcaagacccaccttgccagactgagctcagcaatattcagaagcggcaaggggtaaagaagctcctaggacagtatatccccctgtgtgatgaagatggttactacaagccaacacaatgtcatggcagtgttggacagtgctggtgtgttgacagatatggaaatgaagtcatgggatccagaataaatggtgttgcagattgtgctatagattttgagatctccggagattttgctagtggcgattttcatgaatggactgatgatgaggatgatgaagacgatattatgaatgatgaagatgaaattgaagatgatgatgaagatgaaggggatgatgatgatggtggtgatgaccatgatgtatacatttgattgatgacagttgaaatcaataaattctacatttctaatatttacaaaaatgatagcctatttaaaattatcttcttccccaataacaaaatgattctaaacctcacatatattttgtataattatttgaaaaattgcagctaaagttatagaactttatgtttaaataagaatcatttgctttgagtttttatattccttacacaaaaagaaaatacatatgcagtctagtcagacaaaataaagttttgaagtgctactataataagtttttcacgagaacaaactttgtaaatcttccataagcaaaatgacagctagtgcttgggatcgtacatgttaattttctgaaagataattctaagtgaaatttaaaataaataaatttttaatgacctgggtcttaaggatttaggaaaaatatgcatgctttaattgcatttccaaagtagcatcttgctagacctagttgagtcaggataacagagagataccacatggcaagaaaaacaaagtgacaattgtagagtcctcaattgtgtttacattaatagtggtgtttttacctatgaaattattctggatctaataggacattttacaaaatggcaagtatggaaaaccatggattctgaaagttaaaaatttagttgttctccccaatgtgtattttaatttggatggcagtctcatgcagattttttaaaagattctttaataacatgatttgtttgcctttctagatttctttatctttctgaccagcaacttagggagcagaatttaaattaggaagacaaagggaaagattcatttaaaccatatttttacaaagtttgtcatttgccccaaggtcaaattttaaattcttaattttcattttatttcccattttaggtaaaagtttgcatttaatcttagaattatgttatttttgttagtagtgtggaaacttagagaacttattgtatggtgccttgcaaaaatagagatagaaagattttagcatgcataccaatatagtatattacgcaatatataagcacacctaattaacagattaatatcagtaaaggtattgctgctggaatgaagaaaatgggatacgtttgtttctttttttctattgttacataattgccatgtggacttgtttatgattattgtgtagagtagcatttaagatttaactgtagcaaaaattactttaaccgctgtatttaagttagcatgttaattaattgtgtagacattttggcacaccatcacttttaactatatcataccaatggttttgtgcccataataaaaatggaaaaacctgttgaatgttacgtattggtatctttaatttcaacagtgggtaaactggtttcccagtatacaattcattgaaagcaaaattgattaattatttccatttaatttatacacactcaatacaaaatttaatgttgactttacgtaataaagtataatgcattttcttttttactgtttatgtatagtttacaaaataaagaatcttgtaaccaaa

SEQ ID NO: 288 - DNA, 3083 bp, Homo sapiens
aggcgcgcgctgtttccggaagtcgcggccggcgtcaccgctgcggctgcctcagctactgccgcagtcgccgcggaattcggcgagtagaaccgctgaggcgggcgcgggcccgggtggggccaaggttccggccactctgcagaatggagataatcaggagcaattttaagagtaatcttcacaaagtgtaccaggccatagaggaggccgacttcttcgccatcgatggggagttttcaggaatcagtgatggaccttcagtctctgcattaacaaatggttttgacactccagaagagaggtatcagaagcttaaaaagcattccatggactttttgctatttcagtttggcctttgcacttttaagtatgactacacagattcaaagtatataacgaagtcatttaacttctatgttttcccgaaacccttcaatagatcctcaccagatgtcaaatttgtttgtcagagctccagcattgactttctagcaagccagggatttgattttaataaagtttttcgaaatggaattccatatttaaatcaggaagaagaaagacagttaagagagcagtatgatgaaaaacgttcacaggcgaatggtgcaggagctctgtcctatgtatctcctaacacttcaaaatgtcctgtcacgattcctgaggatcaaaagaagtttattgaccaagtggtagagaaaatagaggatttattacaaagtgaagaaaacaagaacttggatttagagccatgtaccgggttccaaagaaaactaatttatcagactttgagctggaagtatccgaaaggcattcatgttgagactttagaaactgaaaagaaggagcgatatatagttatcagcaaagtagatgaagaagaacgcaaaagaagagagcagcagaaacatgccaaagaacaggaggagctgaatgatgctgtgggattttctagagtcattcacgccattgctaattcgggaaaacttgttattggacacaatatgctcttggacgtcatgcacacagttcatcagttctactgccctctgcctgcggacttaagtgagtttaaagagatgacaacatgtgttttccccagactcttggatactaaattgatggccagcacacaaccttttaaggatatcattaacaacacatcccttgcggaattggaaaagcggttaaaagagacacctttcaaccctcctaaagttgaaagtgccgaaggttttccaagttatgacacagcctctgaacaactccacgaggcaggctacgatgcctacatcacagggctgtgcttcatctccatggccaattacctaggttcttttctcagccctccaaaaattcatgtgtctgccagatcaaaactcattgaacctttttttaacaagttatttcttatgagggtcatggatatcccctatctaaacttggaaggaccagacttgcagcctaaacgtgatcatgttctccatgtgacattccccaaagaatggaaaaccagcgacctttaccagcttttcagtgcctttggtaacattcagatatcctggattgatgacacatcagcatttgtttcccttagccagcccgagcaagtaaagattgctgtcaataccagcaaatatgcagaaagctatcggatccaaacctatgctgaatatatggggagaaaacaggaagagaagcagatcaaaagaaagtggactgaagatagctggaaggaggctgacagcaaacggttaaacccccagtgcataccctacaccctgcagaatcactattaccgcaacaatagttttacagctcccagcacagtaggaaagagaaatttgagtcctagtcaagaggaagctggcctggaggacggagtgtcaggggagatttccgacactgagcttgagcagaccgattcctgtgcagagcccctctcagagggaaggaaaaaggccaagaaattaaaaagaatgaagaaggagctttctccagcaggaagcatctcgaagaacagccctgccacactctttgaagttcctgacacatggtaaccaagacctgagggcagcaaaccgctggtgctgtcgctgtgagcaagagccggctggcacatttggaagccgcactgtatttaacttaatcaaatgtggtatgggaggggttggaaaccaagttgtctcctgggggggagaaaacaggttttatttttgtggctgtggttttttcccctttttaatctaactgcctgttgacattgacactcatcacggttgtaggctgtcatgaatgtgtacgtgcttaaccagtgaattccgtgttgctcttgtgaggcctttcctgtcatgacccagtgtgcttaagaacctgcctgatggggagtgtcggctgtgaaatctgcaaaaagagctgacattccagctgctgtgatcatgaatttgggggtgtactgtcctgcctgtgcatcttctcgcactgagattttgaggcagttgcagccctcggttagtctcccagtggaaaaatcggttgtgcctccctgcttcccaccatagctgcctgaaaacatgacgctctcaagcttgtccttccttcaggaagatgtccactcatgcccacccatgagagggcttgccgtatgccctggcctttgggcatatttatgtagagttcctttctcctaagacgtgagtttctcatgggggatgtacgagtaaaaaggttaacttctgttcttatgcgtggcgctgtgttcactttccagagtctctgttcgtttgtttggatggcggtctcggggtacggcagcgtgtgtgcgtacgtgtctgtgtgtgtgtgtgtgtgtgtgtgtgtgtgtgtgtgtgtgtgtgtgtgaaatcgtgcaaatctacaacatgtcccagcccattctccgttgaaacagatcacagcaacgacaaacgctcatggcgctgctttgctccacccgcttcagatagatcattgttagatatttcacatttttgtatggtggaaataaaaatgaaaaatgtatttccaaaagatgaaaattaaaaacattttcataggac

SEQ ID NO: 289 - DNA, 2153 bp, Homo sapiens
cgaccccgagaggcccggttcctttaggccgcctgcccgcctccagctctcggggtcggctccaggaggcgccctcaggagaggggcgggcgctctattccagagaccgagtggcagggcggccactgtggcggggctctttccccgtttcgcctcagctacccctcagctccggtagtcgccagtccggggtcgtcgccgtttggggcgggagctgctcggccccgccgccgtccccgtcgccgcttccgggtccaggcccctcgggccgcctgccgccgtcatgaggctgcgggtgcggcttctgaagcggacctggccgctggaggtgcccgagacggagccgacgctggggcatttgcgctcgcacctgaggcagtccctgctgtgcacctgggggtacagttctaatacccgatttacaattacattgaactacaaggatcccctcactggagatgaagagaccttggcttcatatgggattgtttctggggacttgatatgtttgattcttcaagatgacattccagcgcctaatataccttcatccacagattcagagcattcttcactccagaataatgagcaaccctctttggccaccagctccaatcagactagcatgcaggatgaacaaccaagtgattcattccaaggacaggcagcccagtctggtgtttggaatgacgacagtatgttagggcctagtcaaaattttgaagctgagtcaattcaagataatgcgcatatggcagagggcacaggtttctatccctcagaacccatgctctgtagtgaatcggtggaagggcaagtgccacattcattagagaccttgtatcaatcagctgactgttctgatgccaatgatgccttgatagtgttgatacatcttctcatgttggagtcaggttacatacctcagggcaccgaagccaaagcactgtccatgccggagaagtggaagttgagcggggtgtataagctgcagtacatgcatcctctctgcgagggcagctccgctactctcacctgtgtgcctttgggaaacctgattgttgtaaatgctacactaaaaatcaacaatgagattagaagtgtgaaaagattgcagctgctaccagaatcttttatttgcaaagagaaactaggggaaaatgtagccaacatatacaaagatcttcagaaactctctcgcctctttaaagaccagctggtgtatcctcttctggcttttacccgacaagcactgaacctaccagatgtatttgggttggtcgtcctcccattggaactgaaactacggatcttccgacttctggatgttcgttccgtcttgtctttgtctgcggtttgtcgtgacctctttactgcttcaaatgacccactcctgtggaggtttttatatctgcgtgattttcgagacaatactgtcagagttcaagacacagattggaaagaactgtacaggaagaggcacatacaaagaaaagaatccccgaaagggcggtttgtgatgctcctgccatcgtcaactcacaccattccattctatcccaaccccttgcaccctaggccatttcctagctcccgccttcctccaggaattatcgggggtgaatatgaccaaagaccaacacttccctatgttggagacccaatcagttcactcattcctggtcctggggagacgcccagccagtttcctccactgagaccacgctttgatccagttggcccacttccaggacctaaccccatcttgccagggcgaggcggccccaatgacagatttccctttagacccagcaggggtcggccaactgatggccggctgtcattcatgtgattgatttgtaatttcatttctggagctccatttgtttttgtttctaaactacagatgtcaactccttggggtgctgatctcgagtgttattttctgattgtggtgttgagagttgcactcccagaaaccttttaagagatacatttatagccctaggggtggtatgacccaaaggttcctctgtgacaaggttggccttgggaatagttggctgccaatctccctgctcttggttctcctctagattgaagtttgttttctgatgctgttcttaccagattaaaaaaaagtgtaaattaca

SEQ ID NO: 290 - DNA, 790 bp, Homo sapiens
tgtgacgtcacggcgtcgttggtaaggggctggcggccggggagctgcgtagctcccggccccgcggccatgcccaagcggagctgccccttcgcggacgtggccccgctacagctcaaggtccgcgtgagccagagggagttgagccgcggcgtgtgcgccgagcgctactcgcaggaggtcttcgagaagaccaagcgactcctgttcctcggggcccaggcctacctggaccacgtgtgggatgaaggctgtgccgtcgttcacctgccagagtccccaaagcctggccctacaggggccccgagggctgcacgtgggcagatgctgattggaccagacggccgcctgatcaggagccttgggcaggcctccgaagctgacccatctggggtagcgtccattgcctgttcctcatgcgtgcgagccgtggatgggaaggcggtctgcggtcagtgtgagcgagccctgtgcgggcagtgtgtgcgcacctgctggggctgcggctccgtggcctgtaccctgtgtggcctcgtggactgcagtgacatgtacgagaaagtgctgtgcaccagctgtgccatgttcgagacctgaggctggctcaagccggctgccttcaccgggagccacgccgtgcatggcagccttccctggacgagcgctcggtgttcacactgaactgtggggtcgacgggaggggtgccttttacatgttctattttgtatcctaatgacagaatgaataaacctctttatatttgcacaagaaaaaaaaaaaaaaaaaaaa

SEQ ID NO: 291 - DNA, 2119 bp, Homo sapiens
atttcctctgggttacggcgcaggcgcaagataagctaggagccgcgcgagtcgtagtgtcgctgtttgcgggtctccgcgcgggaccggggcgcagcggggtcgctgaggcgagggtgtcatgtcagacaacgaggacaattttgatggcgacgactttgatgatgtggaggaggatgaagggctagatgacttggagaatgccgaagaggaaggccaggagaatgtcgagatcctcccctctggggagcgaccgcaggccaaccagaagcgaatcaccacaccatacatgaccaagtacgagcgagcccgcgtgctgggcacccgagcgctccagattgcgatgtgtgcccctgtgatggtggagctggagggggagacagatcctctgctcattgccatgaaggaactcaaggcccgaaagatccccatcatcattcgccgttacctgccagatgggagctatgaagactggggggtggacgagctcatcatcaccgactgagctggagtcatcttcctgcccttgccccatgcccaattttcattctcactttatatgtgtaaataataaaatattcaactttccaacccccttcccctctgcttatctgcaatgtcaccacctgttgcttccccgttaccgccatgctgcgtggagcatgcacctattccagtggccctgtgactgtcagctccttaagaagcaccaggggcccttagcccctttggatcccccacatccttccctccatctccctgttccccagagcaaaggctgctgcaggggagacacctcagctgccttccaagcagacagacaagtctttgtgcccagggagctggttgccacggaaacccccaatttcctttccagtggggactggctgcaggggcttctcccttctcaggagtatcacagagcaggtctcatcaagccacccattgtttcctaaggacctgcttcgagcctcttatcgtgggctcggatcccctttcaggagcagtgccccagcaggaagcgtgggggtgtgctgatctcccaccctccccaggcagagccctgctgggcaagtcagcagctggagcaaggaccgagcacctgcctacccctgcccccatggctctgtccccactcctcctcaggactctgcccacacgctgtcctctgtggcccacctctttggtgtgccacacccatgccttcttcctagcctctataagatatcctttccctcctatttggggctggtgatcccctgaggccttggggacatggtgctggggtggtggtgctcctgggttccaggtgttacattaagtcagagctggagttcccccttcctctgcctgaggttctaatgggtcctcttcctttctccaccctgcttacccaacctgaggtaagaccagtcacactggctcctccctcctagagggggtcagggggagggtgtatattgacatgaacagggatagagggtaaactggctccctgaatatgccagccttaacctccattccactgccagctccccttcaaagaggaggagctgggcttccctaacctctgcaggaggcagggcctccaggcctaggtgcagcctggccctgggatgggatgtggggagtgaatggtgaggatctgcattggtgggaggggtgtccgctgccctggagaagggttaattcagggagcagtggacttcacactcccatccaccctcctccaagcctgtggaatcctttaatcaagttgggtgctgaaatttcagctctgaaatgccgcctttgtgctggcatccaggcagccgccccagagtgcgggggtcactttctcggccccatttctctaaatggtctctttgttccctgctgggctgctcagtatcagatgtgattaaagggagatggggtttgggctggggaggaggggaattgggggttaacccttaggggatagagtgcaagggaaatgggacagaaggggtgtttttcctcctgtcttcctcttcccattctcctcttttggggagtcccctgctattcagctgtctgggcctggcttttgacttctcttgaataaaatgtcccggtcaccaaaaaaaaaaaaaaaaaa

SEQ ID NO: 292 - DNA, 2438 bp, Homo sapiens
aaacatggggcggggcggcgcggccggggaagcgtgatgaaggcctacgagtgcggcgcggcctgaaggggcacgcgggggacctgcaaagctagtgaggggcggggcaggcggcgcggtgggggcgggccgagcccggaggccagatgagcggacacagccccacgcgcggggccatgcaggtggccatgaacggtaaggcccgcaaagaggcggtgcagactgcggctaaggaactcctcaagttcgtgaaccggagtccctctcctttccatgctgtggctgaatgccgcaaccgccttctccaggctggcttcagtgaactcaaggagactgagaaatggaatattaagcccgagagcaagtacttcatgaccaggaactcctccaccatcatagcttttgctgtagggggccagtacgttcctggcaatggcttcagcctcatcggggcccacacggacagcccctgcctccgggtgaaacgtcggtctcgccgcagccaggtgggcttccagcaagtcggtgtggagacctatggtggtgggatctggagcacctggtttgaccgtgacctgactctggctggacgcgtcattgtcaagtgccctacctcaggtcggctggagcagcagctggtgcacgtggagcggcccattcttcgcatcccacacctggccatccatctgcagcgaaatatcaacgagaactttgggcccaacacagagatgcatctagtccccattcttgccacagccatccaggaggagctggagaaggggactcctgagccagggcctctcaatgctgtggatgagcggcaccattcggtcctcatgtccctgctctgtgcccatctggggctgagccccaaggacatagtggagatggagctctgccttgcagacacccagcctgcggtcttgggtggtgcctatgatgagttcatctttgctcctcggctggacaatctgcacagctgcttctgtgccctgcaggccttgatagattcctgtgcaggccctggctccctggccacagagcctcacgtgcgcatggtcacactctatgacaacgaagaggtggggtctgagagtgcacagggagcacagtcactgctgacagagctggtgctgcggcggatctcagcctcgtgccagcacccgacagccttcgaggaagccatacccaagtccttcatgatcagcgcagacatggcccatgctgtgcatcccaactacctggacaagcatgaggagaaccaccggcctttattccacaagggccccgtgatcaaggtgaacagcaagcaacgctatgcttcaaacgcggtgtcagaggccctgatccgagaggtggccaacaaagtcaaggtccccctgcaggatctcatggtccggaatgacaccccctgtggaaccaccattggacctatcttggcttctcggctggggctgcgggtgctggatttaggcagcccccaactggccatgcactctatccgggagatggcctgcaccacaggagtcctccagaccctcaccctcttcaagggcttctttgagctgttcccttctctaagccataatctcttagtggattgagccctcttggaaagacttctctgccatccctttgcacctgagaggggaagttctcagctgagctgaagctggattattaaagtggattgtcactcagactctccgtgctacgcttatttggagactagaggagtgggagttgagcctggcttgaacctttggaaccagaaaagttggggagcaggtggaggaggccacactcctgggagctgatggttttaaatctggttttaaatctcttctctgtctcaagtccatgtctgaagtgggtgaagggtggactggatcctcaagcagaaggtcacttctcccacccctagtcctccacctgggaaatggcctcaacggtcttccctctttccatccccagaatgggtgtcccgctctgccttcagagatcctgttctgcactgggccaccttcagagctgctctgggcagacaaagctgtttctcaccctcccaaaatcccttcccatcccctctcaggagctgcaaagagaagggcacagtctataccttatcacccttcatcatccacttctcagcagtccctggtattacttgattgtgaacatattatcaggaaaaaagattatcattgaaaaaattggaaaagtcaaagtctggccgggtgcagcggctcacatctgtattcccagcattttgggaggccaaggcaggtggatcacttgaggtcagagttcaagaccagccttgccaacatggtgaaacccatctctacttaaaaaaaaatacaaaaaaattagccaggcatggtggcacacacctgtaatctcagctattcaggagactgaggcaggagaatagcttg

SEQ ID NO: 293 - DNA, 22 bp, Artificial Sequence
  Description of Artificial Sequence: Synthetic oligonucleotide
tgaaaaatggagaaacaagacg

SEQ ID NO: 294 - DNA, 20 bp, Artificial Sequence
  Description of Artificial Sequence: Synthetic oligonucleotide
ttcccattgagccaggttta

SEQ ID NO: 295 - DNA, 20 bp, Artificial Sequence
  Description of Artificial Sequence: Synthetic oligonucleotide
ctggagagccaacctcaaag

SEQ ID NO: 296 - DNA, 23 bp, Artificial Sequence
  Description of Artificial Sequence: Synthetic oligonucleotide
tcaataacaaaagtcaggtgagc

SEQ ID NO: 297 - DNA, 23 bp, Artificial Sequence
  Description of Artificial Sequence: Synthetic oligonucleotide
atcactagacaaggaagaaagca

SEQ ID NO: 298 - DNA, 26 bp, Artificial Sequence
  Description of Artificial Sequence: Synthetic oligonucleotide
ttagagactgtgaaggaattagcaga

SEQ ID NO: 299 - DNA, 20 bp, Artificial Sequence
  Description of Artificial Sequence: Synthetic oligonucleotide
cagccagaactgcagaagaa

SEQ ID NO: 300 - DNA, 20 bp, Artificial Sequence
  Description of Artificial Sequence: Synthetic oligonucleotide
aggcttcttgacacctggaa

SEQ ID NO: 301 - DNA, 20 bp, Artificial Sequence
  Description of Artificial Sequence: Synthetic oligonucleotide
gggacagctgggtcttcata

SEQ ID NO: 302 - DNA, 19 bp, Artificial Sequence
  Description of Artificial Sequence: Synthetic oligonucleotide
ctctggccatccctcgtat

SEQ ID NO: 303 - DNA, 20 bp, Artificial Sequence
  Description of Artificial Sequence: Synthetic oligonucleotide
tgacttggggagttcctacg

SEQ ID NO: 304 - DNA, 20 bp, Artificial Sequence
  Description of Artificial Sequence: Synthetic oligonucleotide
tgtttgtgtctgggctgttc

SEQ ID NO: 305 - DNA, 20 bp, Artificial Sequence
  Description of Artificial Sequence: Synthetic oligonucleotide
gggttttggtctcaccactg

SEQ ID NO: 306 - DNA, 19 bp, Artificial Sequence
  Description of Artificial Sequence: Synthetic oligonucleotide
atcccagaggcatccaaag

SEQ ID NO: 307 - DNA, 20 bp, Artificial Sequence
  Description of Artificial Sequence: Synthetic oligonucleotide
agaagctggcatcagaaaaa

SEQ ID NO: 308 - DNA, 21 bp, Artificial Sequence
  Description of Artificial Sequence: Synthetic oligonucleotide
gcctcagatggtaaagtcagc

SEQ ID NO: 309 - DNA, 20 bp, Artificial Sequence
  Description of Artificial Sequence: Synthetic oligonucleotide
gctggaccaatagcaaggtg

SEQ ID NO: 310 - DNA, 19 bp, Artificial Sequence
  Description of Artificial Sequence: Synthetic oligonucleotide
aaggaagcatgggaaggtg

SEQ ID NO: 311 - DNA, 20 bp, Artificial Sequence
  Description of Artificial Sequence: Synthetic oligonucleotide
gggttcttcagcgtctatgc

SEQ ID NO: 312 - DNA, 21 bp, Artificial Sequence
  Description of Artificial Sequence: Synthetic oligonucleotide
ttcagcaaaggttgactcaca

SEQ ID NO: 313 - DNA, 22 bp, Artificial Sequence
  Description of Artificial Sequence: Synthetic oligonucleotide
aaaatcccatgacaaatcgttc

SEQ ID NO: 314 - DNA, 20 bp, Artificial Sequence
  Description of Artificial Sequence: Synthetic oligonucleotide
gggcaacagtgaagtggttt

SEQ ID NO: 315 - DNA, 20 bp, Artificial Sequence
  Description of Artificial Sequence: Synthetic oligonucleotide
actccacagataccccgaag

SEQ ID NO: 316 - DNA, 19 bp, Artificial Sequence
  Description of Artificial Sequence: Synthetic oligonucleotide
tccaccacttgctgagctg

SEQ ID NO: 317 - DNA, 20 bp, Artificial Sequence
  Description of Artificial Sequence: Synthetic oligonucleotide
acatttttgaggccaacgac

SEQ ID NO: 318 - DNA, 20 bp, Artificial Sequence
  Description of Artificial Sequence: Synthetic oligonucleotide
ctcccacgttcaccttgttt

SEQ ID NO: 319 - DNA, 19 bp, Artificial Sequence
  Description of Artificial Sequence: Synthetic oligonucleotide
cctggagcagccgtatctg

SEQ ID NO: 320 - DNA, 21 bp, Artificial Sequence
  Description of Artificial Sequence: Synthetic oligonucleotide
gacaaactcctttcggtcaca

SEQ ID NO: 321 - DNA, 20 bp, Artificial Sequence
  Description of Artificial Sequence: Synthetic oligonucleotide
cccagtcagtgcacaaagag

SEQ ID NO: 322 - DNA, 20 bp, Artificial Sequence
  Description of Artificial Sequence: Synthetic oligonucleotide
gcattgtggtcaaactgcat

SEQ ID NO: 323 - DNA, 20 bp, Artificial Sequence
  Description of Artificial Sequence: Synthetic oligonucleotide
gcaatctgcagagttcgtga

SEQ ID NO: 324 - DNA, 20 bp, Artificial Sequence
  Description of Artificial Sequence: Synthetic oligonucleotide
gccatcatctgcgactctaa

SEQ ID NO: 325 - DNA, 21 bp, Artificial Sequence
  Description of Artificial Sequence: Synthetic oligonucleotide
tggagcagatcctcttcatct

SEQ ID NO: 326 - DNA, 19 bp, Artificial Sequence
  Description of Artificial Sequence: Synthetic oligonucleotide
ccaaggtcagcagcacaat

SEQ ID NO: 327 - DNA, 4342 bp, Homo sapiens
gatcaatactgaggccgcgtccgacccccttgagccgagatccccccccagcccagcccccaccccaccccccgcacacgccccaccccccccacgacccagcctcataccgcaccagctgaggcacccaagaggattaccccctggggccctctcccgccccccaaaaaagagaagatcccctctcctggcccatcccttcccttcttccctcccccctccccccgaactttccctctcgcatgcttttcccctgcaccacggatcgcctctcggatgccgcttgcctggaagctgcgttaggagcgagcggcggcggtggcggcggtggcggcggcggcggcagctcgggagtgctatgaccggcaaactcgccgagaagctgccggtgaccatgagcagtttgctaaaccaactgcctgacaatctgtaccccgaggagatccccagcgcgctcaacctcttctccggcagcagcgactcggtagtccattacaatcagatggctacagagaatgtaatggacatcggtctgaccaacgagaagcccaacccggaactctcttactccggctccttccagccagcccccggcaacaagaccgtgacctacttgggaaagttcgccttcgactccccttccaactggtgccaggacaacatcattagcctcatgagcgccggcatcttgggggtgcccccggcttcaggggcgctcagcacgcagacgtccacggccagcatggtgcagccaccgcagggtgacgtggaggccatgtatcccgcgctacccccctactccaactgcggcgacctctactcagagcccgtgtctttccacgacccccagggcaatcccgggctcgcctattccccccaggattaccaatcggccaagccggcgttggacagcaatctcttccccatgattcctgactacaacctctaccaccaccccaacgacatgggctccattccggagcacaagcccttccagggcatggaccccatccgggtcaacccgccccctattacccctctggagaccatcaaggcattcaaagacaagcagatccacccgggctttggcagcctgccccagccgccgctcaccctcaagcccatccggccccgcaagtaccccaaccggcctagcaagacaccgctccacgaacggccccacgcgtgcccggccgagggctgcgaccgccgtttcagccgttcggacgagctgacccggcacctgcgcatccacacgggccacaagcccttccagtgccggatctgcatgcggagcttcagccgcagcgaccacctcaccactcacatccgcactcatacgggcgagaagccctttgcctgcgagttctgcgggcgcaagtttgcgcgcagcgacgagcgcaagcgccacgccaagatccacctcaagcaaaaggagaagaaggcggagaagggcggtgcaccctctgcatcctcggcgccccccgtgtcgctggcccccgtggtcaccacctgcgcctgaggatcgggcccccagatccccacttttcccctccagtgcctcccggctgctagcctgaaagcagcgggaaagccagccacggaggcgtaggggccgcgccctggcctctccatggacgtgcggccccttgcttccccttcgatgcccccggttcccaacctttcacgccggccagcggtcaggggccagggctggaggcgccttcccctcgcggtcccccacttagccaaggcgtgggggcggaaaggtggcgtctagcccgctttgttcagttcggatcgccttgatccaggggccgccgggccgcgccaaggacctgcaagggactgaaggcggagcccatccaaccctcgcccgacccaaacacctcattgtttcccccacgtctccctctataccccctcgaagactcgagagggggagggggtaaggagcgcaccaaagcgcagagcttgctgcccgccgcacgcacgcgcgcctgcgtgcggggatgcgcgcgagtgtgtgcgtgctcgcgtgtgtgtgtatgtgtgtgtgtgagtgtgtgtgtgtgcgcgcgcgcaagcgtgtgtgtttaagactcttgagctgaactgggctgtgtttaccccaaactcttccccacctcgggtccccaagccgctgggagatgtcccatgctgggggtccgcacgtggctggaggaggtggtcttccatccgctctgaaatcatgtttcttagagaaatgcctcggatgccgccgacgcggtgctgctgccgccgcttcgggtttggcccctcagaacccctccttttctgagcgcttccctcttaggcctcagggcagtttgatctgtggggagaaagagcagccatcgctgagcctgccttttaaaatatatgtgtatttccttagccccactctaagaaatctatgttcctgagtttgccccctgccctcccactccttccccttctcccctctaaaccttctcccatctctttcaaaatcttttcccagaaaggcaggcttcaaccagccactccagctttgtgtcttctctcaattacatagcaatttctccttcccaccatcatggggaagctggctctgcttttgccctttgtcatcaccaacacaacagatagaatttaaatataagtatatggtgtgcgtgtgtatgtatgtgtatgtatatgcatgcatgtgtataaagatgcacatgcgtacatatacataacatacacacaatatgtattcctagcaaaataaaatctctaaggtacttggttatccagtgcagtgcaccggaataaagagaatttgtaggcgtatacagctttaaatgatttattttttatgaaaatgttaactgatgagattatatctacatacgtgtgttatgtgtgtggatatagatgcacacatatctgtacatatacatgtgagtgtacatatatacacatatacacatctatgtatggatatgtgtgtatacacatatacacatctctgtccaaaatttcctcaaagatatggggattttttcatgaatccatgtggatgaatgaggtgtctcctttccatacccagtctcaccttctccccaccctacctcacctcttctcaggcacccctcttccccagctgtcctgccagcccttctcgtacagggtggctcctttgaagtggagtaatagggaaggttgctctctgccacagcttgcagcatggtcttgactgaatgtactgttcctgttagcgttacttctcctgtggtcagtaagttgcccagagagaaggaacaaaggtctggagtttacagaatgtctgtttttaaagtcactttatgcgttttccacttttttcttttttaagaaaaagaagtaccatttttgttttgttttgttttgatttttggtggtggataaataatactaaaaggactctagtggaaaggggggatatcgaagagcagggggttgtgaatttccaggtacttggactttttgtagaaggagagagaagaagatgaagtttgccaggagggcccatattttttcagctgaagggtaaaatctttctttgcagagacagtattttgctgaatactttttataatgtgatgattattaaaaaagcaaaaattttggtcacttccaagctagaaggaggaatcagataccctttaatattttttcctcgctccttctggtatatgcatgtcactgcatgataattgagttttcctttgttttaataaaactgttctcagacattaagctaaactaagagaaaaataactttgttgccaaaaggttgtgctatccagattttttatatgtctgcatgtttaaaaaaaaaaagcaacaaaagaaaatgcactctaacttatgtgaactgagagaaaaaaatcaggttttaaacaggaaaacctatggggaatgatattttttgaaagacttttgtataaagttgagtacttagaaaaaagacaaaccagatgtaatatattttgtggatgtttttatttcttggatttatagtaccttatactaaggttaaaaaaatatgcttgatattgtgaaaaggtgaaattcttcaccaacatttcatttgctcctttgtcatattgtaatgccaatataatatagttaatgaaaacagcatttttaaaaaccgaaatattgaaatggtgtaatgttgtaccatttgcactgtgagcaaatgctaatacagtaaatatattgtgtttgctgacaatcagccggcctataaatctccttattttatttcttgtttttatagcataaagctttagtttggcctgaaaaaaaa

SEQ ID NO: 328 - DNA, 7741 bp, Homo sapiens
gctctcctccttcccgctcggtccgccggttcgctcagttctagcttcaggttccacgccgcggcctcgctctcctactaaagccagcccagcagtcgcagcgcgcacacgcacgccccgcgtctcccgcgcccggcgcccggctctccccacgcgcgcacacctcgcgcacggacgcacccacgtttgtcctcgcgcgccgggggctcggcggcggcggcaggggcagcggcagaagcaggcagaccgcgcggggcagtaccgtagcggccgtcacgggctggccggccggccatggaggctgatggggccggcgagcagatgagaccgctactcacccggggtcctgatgaagaagctgttgtggatcttggcaaaactagctcaactgtgaacaccaagtttgaaaaagaagaactagaaagtcatagagctgtatatattggtgttcacgtcccgtttagtaaagagagtcgtcggcgtcataggcatcgcggacacaaacatcaccaccggagaagaaaagataaagaatcagataaagaagatggacgggaatctccttcttatgatacaccatcccagagagttcagtttatccttggtactgaagatgatgatgaagaacatattccccatgatctcttcacggaaatggatgaactgtgttacagagatggagaagaatatgaatggaaagaaactgctagatggctgaaatttgaagaggatgttgaagatggcggtgaccgatggagtaaaccttatgtggcaactctctctttgcacagtctttttgaactaaggagttgcatcctcaatggaacagtcatgctggatatgagagcaagcactctagatgaaatagcagatatggtattagacaacatgatagcttctggccaattagacgagtccatacgagagaatgtcagagaagctcttctgaagagacatcatcatcagaatgagaaaagattcaccagtcggattcctcttgttcgatcttttgcagatataggcaagaaacattctgaccctcacttgcttgaaaggaatggtattttggcctctccccagtctgctcctggaaacttggacaatagtaaaagtggagaaattaaaggtaatggaagtggtggaagcagagaaaatagtactgttgacttcagcaaggttgatatgaatttcatgagaaaaattcctacgggtgctgaggcatccaacgtcctggtgggcgaagtagactttttggaaaggccaataattgcatttgtgagactggctcctgctgtcctccttacagggttgactgaggtccctgttccaaccaggtttttgtttttgttattgggtccagcgggcaaggcaccacagtaccatgaaattggacgatcaatagccactctcatgacagatgagattttccatgatgtagcttataaagcaaaagacagaaatgacctcttatctggaattgatgaatttttagatcaagtaactgtcctacctccaggagagtgggatccttctatacgcatagaaccaccaaaaagtgtcccttctcaggaaaagagaaagattcctgtgtttcacaatggatctacccccacactgggtgagactcctaaagaggccgctcatcatgctgggcctgagctacagaggactggacggctttttggtggtttgatacttgacatcaaaaggaaagcaccttttttcttgagtgacttcaaggatgcattaagcctgcagtgcctggcctcgattcttttcctatactgtgcctgtatgtctcctgtaatcacttttggagggctgcttggagaagctacagaaggcagaataagtgcaatagagtctctttttggagcatcattaactgggattgcctattcattgtttgctgggcaacctctaacaatattggggagcacaggtccagttctagtgtttgaaaaaattttatataaattctgcagagattatcaactttcttatctgtctttaagaaccagtattggtctgtggacttcttttttgtgcattgttttggttgcaacagatgcaagcagccttgtgtgttatattactcgatttacagaagaggcttttgcagcccttatttgcatcatattcatctacgaggctttggagaagctctttgatttaggagaaacatatgcatttaatatgcacaacaacttagataaactgaccagctactcatgtgtatgtactgaacctccaaaccccagcaatgaaactctagcacaatggaagaaagataatataacagcacacaatatttcctggagaaatcttactgtttctgaatgtaaaaaacttcgtggtgtattcttggggtcagcttgtggtcatcatggaccttatattccagatgtgctcttttggtgtgtcatcttgtttttcacaacattttttctgtcttcattcctcaagcaatttaagaccaagcgttactttcctaccaaggtgcgatcgacaatcagtgattttgctgtatttctcacaatagtaataatggttacaattgactaccttgtaggagttccatctcctaaacttcatgttcctgaaaaatttgagcctactcatccagagagagggtggatcataagcccactgggagataatccttggtggaccttattaatagctgctattcctgctttgctttgtaccattctcatctttatggatcaacaaatcacagctgtaattataaacagaaaggaacacaaattgaagaaaggagctggctatcaccttgatttgctcatggttggcgttatgttgggagtttgctctgtcatgggacttccatggtttgtggctgcaacagtgttgtcaataagtcatgtcaacagcttaaaagttgaatctgaatgttctgctccaggggaacaacccaagtttttgggaattcgtgaacagcgggttacagggctaatgatttttattctaatgggcctctctgtgttcatgacttcagtcctaaagtttattccaatgcctgttctgtatggtgttttcctttatatgggagtttcctcattaaaaggaatccagttatttgaccgtataaaattatttggaatgcctgctaagcatcagcctgatttgatatacctccgttatgtgccgctctggaaggtccatattttcacagtcattcagcttacttgtttggtccttttatgggtgataaaagtttcagctgctgcagtggtttttcccatgatggttcttgcattagtgtttgtgcgcaaactcatggacctgtgtttcacgaagagagaacttagttggcttgatgatcttatgccagaaagtaagaaaaagaaagaagatgacaaaaagaaaaaagagaaagaggaagctgaacggatgcttcaagatgatgatgatactgtgcaccttccatttgaagggggaagtctcttgcaaattccagtcaaggccctaaaatatagtgttgatccctcaattgttaacatatcagatgaaatggccaaaactgcacagtggaaggcactttccatgaatactgagaatgccaaagtaaccagatctaacatgagtcctgataaacctgtgagtgtgaaaataagttttgaagatgaaccaagaaagaaatacgtggatgctgaaacttcattatagaattgaaccaagaggcattatacatatagatatatacatatgtaatgtgtgcgtatcatgtcactatatataagaatattgtatgtcatgctgtttatgtgtgactaccgggtttttaaaagtagtgtctggagtttgtaatgagcaccgtggagactatgtatttaatgaaatgctctctttgaagtgaggtacatggttcttaactattcaaatatttattctgttagaaaaaaaaattttctgttttgcaatagaaggatgtggagaaatgctttcagtctacttttcttaaatctctgttcatcagtggcaattcgtaaaaaccttaagtgatactttgtttatatgtttataatttttaggtgtttcctgaaattttcacatattatttcacttttgttagtgctttatgggaagaatagggagtctataccagtgctgtgggaaaaatggtaacatttcagggcttctctatttgtgtttcatttctgtagatgtccatcgtgtttcactaactggcgttttcttagccatagagatgactgtagaacaatagaaactttaataatgatagtttttaacttttatgtttaaattttttttaaatcttaaaaccttcatatctaggtatccattgtgacagacaagtaaaattgcaggtgatttgataattaagcacccataccatttataacttctgaatttaaaaagttatacaatgccagtttgcaatagttgattttgatgcctttgtagaatattttttctgaatccttatgctcttttaaagccaatgattcccactctgttctctgccttgtctctctttgtcttaaaatgctttagtttccatcaggttcaagttcttgactattattctcttataagtagtaggcgtaaataatcaggagttagaattctctcagaagggtctatgatcagtattactttattaagaattacctttcattttctctttatgttattctttcacttttgtagattacatttaatagcttgttacctgtgattttattttaaaatatttattttgatatgatgcttaaatattatataaacatttggaaaagtaacaaatagagtaaattgttaatgtaaatagttggtgcttactttcatttatgtttattatcttaaagcaattgatagattttacatctttgatataaagcactgccatatttatattttaaaaggaaattagacattttatatgtagctcagattaatgacatttttattttgtgtattagtttttgcttttctgagctttttaaagtctaacaaatctttttagtcatcttttatatacttttagttccacatgaaataaatgttgttaagcctgtaggactggatgaatggggttgtgaaactgatttgacaagagaataatttacaaaaatcaaatgagtattgagaagccacagaaatatcaaaaatggtgacatcactattaggatgaaaattttatgaaattccaatgctccctttaaccatataattaaattacaaaggtatacataattaatctaataaaggatcatgaggaatgccaaaagctgaaattttagcaagtctggtgttttaaattcattataaactatttattaactaatgtaatgtcctcctctaagaccatattgtaagagtcttgttaaaatgatggattcaacttctgcctcggatgagaggttggaaatgtagctgcttttctttagaaaatatgtagctgtcatcatttggtactgcctaaaaagagttagactctattggcaattgatagagtattacccacggtgcttattattgtttatgagcttccattgtaatgattcctttttatttgtagcagcataattatttccaaagaccccagtatttgctgctatttttaaaactcccctgatgtacctgaacaagaggatttcctcacatcatttccttgtgtctggacatcaggggtaacaactgtacttactttacaggaagaaattttaaaactgaaaactacctgggatcatagtgtttctgtgattttatttaattgtgtatagtaattatccagtgccagaaaaaccgtcacttgcaaaatactttgcactcaaaatgtttttacaatgcttctaaatgttactggtttctgctttcttttgactacttgactgacaaaatgatctgactactccatttaagagcaaaggtaactcatgtttaggtaattaactgcttgttttaagtgattatatttcttccactgtttttgaaaaataatcaaagatagcattcattgagagacagtgacagatataatttactacatatattgatttttaaataaagttgccttaaataagtgtatgtaagcagtagtagttgctatgtactgatttacctcaaggtgcaaaataattaaacctgtacatattccatttacaaaataaattcagccctgcactttctttagatgccttgatttccagaatggagcttagtgctactgaataccctggccacagagccacctcaggatattcttttctccaccctagtttatttatttatagatatctgtttacaaagtctgtagtaaatcctgatgctgaccatctgaaatgtactttttttctgaatgctgtttcaatctaaaatagcagcttttgagaaaacaatgatgtaaattccttatgataaaaggatgattctatatattctttaatgatattaaatatgccgaagccaagcacacagtctttctaaagtgtgtgtatgtttgtgtgaatgtgaatgatactgatcttatatctgttaaaagttgttttaaaaagctgtggcatcccattgttcatatttgccaagtcttctgtaaagatgtctaggacgaaatattttatgtgctaatgcatgtatttgtaaaccagatttgtttaccactcaaaattaacttgttttcttcatccaaaaaagtttatttcttccacgtacttaaattttctgtgtgggtataatatagctttctaatttttttctttcacaaaggcaggttcaaaattctgttgaaagaaaaatgctttctgaaactgaggtataacaccagagcttgctgtttaaaggattatatgatgtacatcagttctataaatgtgctcagcagtttaacatgtgaatcctgttttaaagtgctcagatttcaactgtgtaagccattgatataacgctgtaattaaaaatgtttatatgaaataacttaatgttttaaatttatttatgtagatcacatcatttttatcgtatgcagtgcaaatatgtgaaatgtcttttggtttattccaacaattatttattttagaaagtaagtttaaagactttaaggacattcaaagtttaaaatagtgttcaaattgcaaaatttggcaatcttcatataaattggtttcttttctaacttttcaaaaactaacattaaatgtcaattataggaaaacatagttggaaatgtaatcatccaaagatcatttttaaaatgaaatttaattagcacatattgaacatttgacttaattgttaaaccccagttttgttttgtttttttaatcagatttttgcacactgattagtttttgtgttgtggcttttgttgctttattattcaaggttttttttttttttcttccccatgggggagattgtcttccaatgtttaactacgtttaaataaataaaaattgaattttattgttcatttatataaaatctgataccttgatgtaatttcacaatacagttccaatttttatggcttttataattacaatgatattttcttctataataaaatccaaagtaaacatttaaattgtagaactgatatttttcatttatatgaagtataagcctctactgggtctatattgtgaatcatcctgcctttcaaatttgtttcataattgttagatgaaaactatttttttggagatgttactgaagttgattgagcaataaaagtctacttaattagtaaaaaaaa

SEQ ID NO: 329 - DNA, 2888 bp, Homo sapiens
ggtcagcggagagtaggcatgtagcttctgcagttgctcctcctcaccctccgcgacctgatttcctagaagggctctgtcacccgaaaagattttccactggcttagaggagggagggcccgccttcccccgttatccattggctgctcgttccgccgcaagttgggggcggggttagggcgcctttcgattgcatcagctggtccagccgaggccaagtcccgggcgctagcccacctcccacccgcctcttggctcctctcctctaggccgtcgctttcgggttctctcatcgcttcgtcgttcgccaatgtttgaggagaaggccagcagtccttcagggaagatgggaggcgaggagaagccgattggtgctggtgaagagaagcaaaaggaaggaggcaaaaagaagaacaaagaaggatctggagatggaggtcgagctgagttgaatccttggcctgaatatatttacacacgtcttgagatgtataatatactaaaagcagaacatgattccattctggcagaaaaggcagaaaaagatagcaagccaattaaagtcactttgcctgatggtaaacaggttgatgcggaatcttggaaaactacaccatatcaaattgcctgtggaattagtcaaggcctggccgacaacaccgttattgctaaagtaaataatgttgtgtgggacctggaccgccctctggaagaagattgtaccttggagcttctcaagtttgaggatgaggaagctcaggcagtgtattggcactctagtgctcacataatgggtgaagccatggaaagagtctatggtggatgtttatgctacggtccgccaatagaaaatggattctattatgacatgtacctcgaagaagggggtgtgtctagcaatgatttctcttctctggaggctttgtgtaagaaaatcattaaagaaaaacaagcttttgaaagactggaagttaagaaagaaactttactggcaatgtttaagtacaacaagttcaaatgccggatattgaatgaaaaggtgaatactccaactaccacagtctatagatgtggccctttgatagatctctgccggggtcctcatgttagacacacgggcaaaattaaggctttaaaaatacacaaaaattcctccacgtactgggaaggcaaagcagatatggagactctccagagaatttatggcatttcattcccagatcctaaaatgttgaaagagtgggagaagttccaagaggaagctaaaaaccgagatcataggaaaattggcagggaccaagaactatatttctttcatgaactcagccctggaagttgcttttttctgccaaaaggagcctacatttataatgcacttattgaattcattaggagcgaatataggaaaagaggattccaggaggtagtcaccccaaacatcttcaacagccgactctggatgacctcgggccactggcagcactacagcgagaacatgttctcctttgaggtggagaaggagctgtttgccctgaaacccatgaactgcccaggacactgccttatgtttgatcatcggccaaggtcctggcgagaactgcctctgcggctagctgattttggggtacttcataggaacgagctgtctggagcactcacaggactcacccgggtacgaagattccaacaggatgatgctcacatattctgtgccatggagcagattgaagatgaaataaaaggttgtttggattttctacgtacggtatatagcgtatttggattttcttttaaactaaacctttctactcgcccggaaaaattccttggagatatcgaagtatgggatcaagctgagaaacaacttgaaaacagtctgaatgaatttggtgaaaagtgggagttaaactctggagatggagctttctatggcccaaagattgacatacagattaaagatgcgattgggcggtaccaccagtgtgcaaccatccagctggatttccagttgcccatcagatttaatcttacttatgtaagccatgatggtgatgataagaaaaggccagtgattgttcatcgagccatcttgggatcagtggaaagaatgattgctatcctcacagaaaactatgggggcaaatggcccttttggctgtcccctcgccaggtaatggtagttccagtgggaccaacctgtgatgaatatgcccaaaaggtacgacaacaattccacgatgccaaattcatggcagacattgatctggatccaggctgtacattgaataaaaagattcgaaatgcacagttagcacagtataacttcattttagttgttggtgaaaaagagaaaatcagtggcactgttaatatccgcacaagagacaataaggtccacggggaacgcaccatttctgaaactatcgagcggctacagcagctcaaagagttccgcagcaaacaggcagaagaagaattttaatgaaaaaattacccagattggctccatggaaaaggaggaacagcgtttccgtaaaattgactttgtactctgaaaacgtcaatttatattgaacttggaggagtttggcaaagtctgaataggtcaacctgcaggcgtaactatttttgacctagtcagtttttaaacaatgtgcatttgaaggagttaattaaaagagagccaataaaatgattttactcattcagtatctgagtactggaagtgaaacatgaggaatgctttagtgtaatgtgggagaacttttttgtaaatttaatgcaattgaaaaagttttcaaattcaattaagataactagaattggattatggtgtaaaaataaaaaaaaaatttattcacataaaaaaaaaaaaaaaaaaaaaaaa

SEQ ID NO: 330 - DNA, 14100 bp, Homo sapiens
ggcgcggtacaggagcagcactgccggcgggggcgggtgccagggacttggaggtggaggggacgcggcggtactctggcgtcttccgacttcgactccttaccttaaaagatgctggagtcatatgtaactccaattttaatgagctatgtgaatcgctacatcaagaacttaaagccgtcggatctacagctttcactatggggtggagacgtggtactcagcaagctcgagttaaagttggatgtgctggaacaggaactgaaattaccattcacttttttaagtggacatattcatgaattgaggattcatgtaccatggacaaaactgggttcagaaccagtggtaattaccatcaatactatggaatgcattttgaaacttaaggatgggatacaggatgaccatgaaagctgtggttctaattctaccaaccgtagtactgctgagagcacaaaatcatcaatcaaaccgcggagaatgcagcaggctgctcctacagatcctgacttaccaccaggttatgtgcagagtctgattagacgagttgtaaataatgtaaacattgtgataaataatctcatactaaaatatgttgaagatgatatcgtcctttccgtcaatatcacttctgcagaatgttatacagtaggtgaattatgggatcgtgcattcatggatatttctgcaactgatttggtgctgagaaaggttatcaatttttctgactgtacagtttgtcttgataaacggaatgccagtggtaaaatagaattttaccaggatcctttattatacaaatgttccttcagaactcgtcttcattttacatatgaaaacctaaattccaagatgccatctgttattaaaattcatactttagtggaaagtttgaaactttctatcacagatcaacaactgcctatgtttattcgtataatgcaacttggaattgctctttactatggagaaataggcaattttaaagaaggcgaaatagaggaccttacttgtcataataaagatatgctaggaaacattacaggttctgaagatgaaacaagaatagatatgcaatatcctgctcagcataaaggtcaagagttatattcacagcaagatgaggagcagccacagggatgggtgtcatgggcctggtcctttgtgcctgcaattgtgagttatgacgatggcgaggaagactttgttgggaacgatcctgcatcaaccatgcatcaacaaaaagcacagactttgaaggatcctattgtttctataggattttattgcacaaaggcaacggtgactttcaaactcacagaaatgcaagttgagagtagttattacagtccacagaaagtaaaatctaaagaagtattgtgttgggaacaagaaggaactacagttgaggcccttatgatgggagaacctttctttgattgccagattgggtttgttggttgcagagccatgtgccttaaaggaattatgggtgttaaagattttgaagagaatatgaatagaagtgaaactgaagcctgtttcttcatttgtggtgacaatttgagtacgaaaggtttcacataccttacaaattcattgtttgattaccgaagcccagaaaataatggtactcgcgcagaatttatcttggattcaactcatcataaggagacatacactgagatagctggaatgcaacggtttggggctttttatatggattacctgtatacaatggagaacactagtggcaaaggttccacaaatcaacaagacttttcttcagggaaaagtgaagatttgggaacagttcaggagaagtccaccaaaagccttgttataggtcctcttgattttcgtttggatagcagtgcggtgcataggattttgaaaatgattgtgtgtgccttggaacatgaatatgaaccatatagcaggctaaaatcagatattaaggatgaaaatgaaacaatactgaatcctgaagaggtggctcttctggaggaatatattcctactcgacatacaagtgttactctcctcaaatgtacctgcacaatttccatggctgaattcaacttgctggaccatttactacctgtcattatgggagaaaagaactcaagtaacttcatgaatactacaaacttccagtctcttcggcctttgccatccattcgaatattggtggataaaattaatctggaacattcagtgccaatgtatgctgaacagttggtgcatgtggtcagcagccttactcaaccttctgataacctgcttcattattgttatgtacactgctatcttaagatatttggtttccaggcaggactgacgtctttggattgcagtggatcttactgcttacctgtaccagttattccctctttcagcactgctctttatgggaaacttctgaaactccccacatgctggaccaaaagatctcagattgctataactgaaggtatatttgaacttccaaatctcacaattcaagctacaagagcacagacacttctcttgcaagcaatatatcaaagttggtctcatcttggaaatgtcagctcttccgcagtgattgaagctttgataaatgaaatcttcctaagtataggtgtgaaatctaagaatcccctgccaactcttgagggctcaatccagaatgttgaattgaagtactgcagcacatcattggtcaaatgtgcctctgggaccatgggatcaataaaaatttgtgccaaagccccagttgatagtggaaaagagaagttgattcccttgcttcagggtccttctgacactaaagaccttcatagcaccaagtggctcaatgagagtagaaagccagagtctctcttagctccagatttgatggccttcacaatccaagttccacaatatattgactactgccacaattccggtgctgtacttctttgcagtatacaaggactagcagttaatattgacccaatcttatatacgtggctcatctatcagcctcagaaacgaacaagtagacatatgcaacagcagcctgtggtagctgttcctcttgttatgccagtttgtagaaggaaagaggatgaggtgtctattggaagtgcccccttggcaaagcagcaatcatatcaggcctctgaatatgccagcagccctgtaaaaacaaaaacggtaacagaatcccgcccattgtcagttcctgttaaagccatgttgaatatatctgaaagctgtagaagtcctgaagaaagaatgaaggaatttattggaattgtttggaatgcagtgaagcatctcacactacagcttgaagtacaatcttgttgtgtgtttattccaaatgatagcctgccttccccaagtacaattgtatctggtgacattcctggaacagtaagaagttggtaccatggacaaaccagcatgccgggaacacttgtcctctgtttgcctcaaataaagattattagtgctgggcacaagtatatggaacctctgcaggagattccatttgttatcccacgacccatccttgaagaaggtgatgcttttccttggacgatcagcttgcataatttcagcatatatacccttcttggaaaacaagtgacactttgcctagtggaacctatgggttgcacctccactctagctgtcacgtctcaaaaactgcttgctacgggacctgatacacgacattcatttgttgtctgtctccatgttgacctagagtcactagagataaaatgctctaatccccaggtccagctcttctatgaactaactgatatcatgaataaggtctggaacaagattcagaagagaggcaatctcaacctatctccaacctctccagagaccatggcagggcctgttcctacttctccagttagaagcagtataggcacagctcctccagataccagcacatgcagcccatctgctgacattgggactactactgagggagattctatacaagcaggtgaggaatcaccattctcagattctgtgaccttggaacaaactacaagtaatattggaggaaccagtggacgtgttagtttatggatgcagtgggtgcttcccaaaattactataaagctctttgctccagatcctgaaaataaaggcacagaggtttgtatggtcagtgaactagaagatctcagtgcttccatagatgtccaggatgtatataccaaagtgaaatgtaaaatagagagtttcaatattgatcactatagaagcagccttggggaagagtgttggtctttggggcaatgtggaggtgtcttcctttcctgtactgacaagctgaacagacgcaccttgttggttcgacccatcagcaagcaggaccctttcagtaattgctctggcttctttccttctacaactacaaaacttctagatggcactcatcagcagcatggattcctctctctgacatacacaaaagctgtaacaaaaaatgtccgccacaagttaacatcaagaaatgagcgaagaagttttcataagttatctgaaggcctaatggatggttctcctcattttcttcatgaaattcttctttcagcacaagcttttgatattgttctttattttcctttacttaatgccattgcaagtatatttcaagcaaaactaccaaagacccaaaaagagaaaagaaaatctcctggtcagcccatgaggacccatacactgacatcccgcaatttacctttgatttatgtcaacacaagtgtaatcagaatttttattccaaaaacagaagaaatgcagccaactgttgaagctaatcaggcagcaaaagaagacactgtggttttgaagattggctctgttgccatggctccccaggctgacaatccccttggcagatctgtccttaggaaagatatttaccagagagccttgaacttaggaattcttcgagatcctggatcagaaatcgaagacagacaataccaaatagatctgcagtccatcaatattggtactgcacagtggcatcaactaaaaccagagaaggaaagtgtctcaggaggggtggtaacagagactgaaaggaattctcaaaatccagcccttgagtggaatatggccagcagcatacggcggcatcaagaaaggagagcaattttgacccccgttttgacagatttttctgtccgaataactggagcacctgctgtcattttcaccaaagtagtttctccagaaaatttgcatactgaggagattttagtgtgtggccattccttagaagtgaatataaccacaaacctggacttcttcctaagtgtggctcaagttcaactcttacatcagttaatagtagcaaatatgactggactggaaccatcaaacaaggctgcagagatctctaaacaagaacagaaaaaagtggatatatttgatggaggcatggctgaaacctcatctcgctacagtggtgctcaggatagtggaattggcagtgacagtgttaaaatcagaatagtgcaaatagagcagcacagtggtgccagtcagcatcgcattgcccgtccctcacgccagtcatcaattgtaaaaaatctaaattttattccctttgacatatttattactgcaagtagaatctcactaatgacctattcctgtatggccttatccaaatcgaaatcacaagaacagaagaataatgaaaaaacagacaagagttcattaaatctcccagaagttgattcagatgttgctaagcccaaccaggcatgtatttccacggtgacagcagaagatctcttaaggagcagcatttcttttccttcagggaaaaaaataggggtcctctctcttgaaagtcttcatgcatccacaaggtcatctgctagacaagcacttggtataactattgttcggcagcctggtcgaagaggaactggtgacttacagctagagccttttctgtactttattgtgtcccagccttccttgcttctgagttgtcaccacagaaagcagcgagtggaagtatccatttttgatgctgtgcttaaaggggtggcctctgattacaaatgtatagatcctgggaagactctgcctgaagcccttgattattgcactgtttggctacagacagtgcctggagaaatagacagcaaaagtggtattccaccttcctttataacactacagattaaagactttctgaatggaccagcggatgtcaatttggatatatcaaagcctttgaaagcaaacctgagtttcaccaaactggatcagataaacctttttttaaagaagataaaaaatgcacacagtttggcacatagtgaagagacttcagccatgtccaacaccatggtgaataaggatgatcttccagtctccaaatattaccgtggaaagttgtctaaacccaaaattcatggtgatggagtgcaaaagatttcagctcaagaaaacatgtggagagctgtttcctgctttcaaaaaatttctgttcaaactactcagattgtgatctccatggaaactgtaccccataccagcaaaccatgcctgttagcatctctctcaaacctcaatggaagccttagtgtcaaggcaacacaaaaagtacctggcataattcttgggtcatcatttctactcagtataaacgattttctccttaaaacaagtctcaaagaaagaagccgcattctgataggaccatgttgtgctactgccaatctggaagctaagtggtgtaaacacagcgggaatccaggcccagaacaatccataccaaaaatatccattgacttaagaggaggtctactacaggtcttctggggtcaagaacatttgaattgtttagttcttctacatgaattactcaatggataccttaatgaggagggaaattttgaagtacaagtttctgaaccagtgcctcaaatgtcatctcctgtggaaaagaatcagacatttaaaagtgaacaaagttcagatgacctacggacaggtctatttcagtatgtacaggatgctgaatctttgaaattgcctggggtctatgaagtcttattttataatgaaactgaagattgcccagggatgatgttatggagatatccagaacctagagtactcacccttgtacgaataactcctgtaccttttaacaccacagaggatccagatattagcacagcagaccttggtgatgtgctacaggttccttgtagcttggaatactgggatgaactccagaaggtttttgttgcatttagagaatttaatctgtctgaaagcaaagtttgtgaactgcagttgccggatatcaatctcgtgaatgaccagaagaaattagtatcttcagatctttggagaattgtcttgaacagcagtcaaaatggagctgatgaccaaagctctgcaagtgagtctggttctcaaagcacttgtgatccacttgtgactccaacagccctggctgcctgtaccagagttgactcctgctttaccccatggtttgtcccatccctttgcgtttctttccagtttgctcacctggaattccatctttgtcatcaccttgaccaactaggcacagctgcaccacagtacctacagccatttgtttccgacagaaatatgccatctgaactagaatacatgattgtttccttcagagaaccacacatgtatcttcgacagtggaataatggttctgtctgtcaggagatccagttcttagctcaagcagactgtaaacttctagagtgcagaaatgtcactatgcaaagtgtggtgaaacccttcagcatcttcgggcagatggcagtttccagcgatgtagtggaaaagctgcttgactgcaccgtgatagttgattctgtatttgtaaaccttggacagcatgtagtccattcactaaacactgcaatacaagcttggcaacagaacaaatgccctgaggtagaggagttggtcttcagccattttgtgatctgtaatgacacacaggagacactgcggtttggccaggtggatactgatgaaaatattctgctggcgagtctccacagtcaccagtacagctggcgctctcacaaatccccacagctgttacacatctgtattgaaggttggggcaactggcgttggtcagagcctttcagtgtggaccatgccgggacttttattagaacaattcagtacaggggtcgaactgcttctctcatcatcaaggttcagcaactcaatggagtacaaaaacagattatcatctgtggaagacagatcatctgtagttacttgtctcaaagcatagaactaaaagtcgttcagcattacattggtcaagatggacaagctgtagttcgggaacattttgactgcctcacagccaaacagaaattgccttcgtacatactagaaaacaatgaactgacggagctgtgtgtgaaggccaaaggagatgaagactggtcaagagatgtgtgcctggaatccaaagcccctgagtacagcattgtcattcaggtgccatcttcaaacagttccattatttatgtctggtgcacagttttgactttagaacccaactctcaagtgcaacaacgaatgattgtgttcagccctctttttatcatgaggagtcatcttccagaccccattatcatacatttggagaaaaggagtctgggattgagtgaaacacaaattattccaggaaaagggcaggaaaaaccactgcaaaacatagaacctgaccttgtacatcacctgacattccaagcaagagaagaatatgatccttcagattgtgcagttcccatctcaacatccctcattaagcaaatagccactaaggtacaccctggaggcacagttaatcagatccttgacgaattctatgggccagaaaagtcgcttcaacccatatggccctataataagaaggattctgacaggaatgaacagctaagtcagtgggatagcccaatgcgagtgaagctgtcaatctggaagccatatgttagaactttgttgatagaacttctgccctgggccctgcttatcaatgaatccaaatgggacctctggctatttgaaggagagaaaattgttctacaggttcctgctggcaaaattattattcctcctaattttcaggaagcttttcaaattggaatatactgggcaaatacaaacactgtgcacaagtcagtagcaattaaactggtccataacctgacatctccaaagtggaaagatggaggtaatggtgaagttgtgacactggatgaagaagcgtttgttgatactgaaataagacttggtgcttttccaggacatcagaagttatgtcagttctgcatttcctccatggtacagcaaggtatacaaattattcagattgaagacaagactacaataatcaataatacaccatatcaaatattttataaaccacagctatctgtctgcaatccccattctggaaaggagtattttcgtgttccagacagtgctacttttagcatttgcccaggtggagagcagcctgctatgaaatccagctcccttccttgctgggacttgatgcctgacatcagtcagtcagtactggatgcatccctgcttcagaaacagatcatgctgggcttttctcctgccccaggtgctgacagctcacagtgctggagcctgccagctatagttagaccagagtttcccagacagagtgtggcagtacccctcgggaatttccgggaaaatggattctgtaccagggctatagtgctgacatatcaagaacacctcggagtgacttatttaaccctctcagaagaccctagtcctcgagtaattatccacaatagatgtccagtaaaaatgcttataaaggaaaacattaaagatattccaaagtttgaggtttattgcaaaaaaattccctccgagtgctcaattcatcatgagctgtatcatcagatttccagttatccggactgcaagaccaaagacttacttccaagcctacttttgagagttgaacctctagatgaagtaacaactgagtggagtgatgccattgacatcaacagtcagggaacacaggttgtgttcctgactggctttggctatgtgtatgtggatgttgtacatcagtgtggcacagtcttcatcactgtggccccagaaggaaaagcaggacctattttaaccaataccaacagagcgccagagaagattgttacatttaaaatgttcatcactcagttaagcctggcagtgtttgatgacctcacccaccacaaagcatcagctgagcttctgagactcacactggacaacatttttctctgtgtggccccgggagctggtcccctccctggggaagagcctgtggctgcgttgtttgaactttactgtgtggagatctgctgtggggacctgcagctagacaaccagctttataacaagtccaatttccactttgctgtcttagtctgccagggagaaaaagcagaacccattcagtgttccaaaatgcagagtctcctcatatccaacaaagagttggaagaatacaaggaaaaatgttttatcaaactttgcatcaccttaaatgaaggcaagagcatcctctgtgatattaatgagttcagctttgaattaaaacctgctcggttatacgtggaagacacatttgtatactacatcaagactttgtttgacacctaccttcctaacagcaggttggctggtcactccacacacctctccgggggtaaacaggtgttgcccatgcaggtcacacagcacgccagggccttggtgaatcctgtgaagttacggaaactggtgatccagccagtaaatttgctcgtcagcatccacgcttccctcaagctgtacatagcctcagaccacactcctctctccttctcggtgtttgaaagaggacccatcttcaccactgcgaggcagcttgtgcacgccctggcaatgcactatgccgctggggccctttttagagcaggctgggtagttgggtctctggatattcttggcagccctgcaagcctggtgagaagcatcgggaacggggtcgccgacttcttcaggcttccgtatgaggggctgacccggggccctggagccttcgtgagtggcgtctccagagggaccacatcgtttgtaaagcacatctccaaaggtaccctcacatccatcaccaacctcgccacaagcctggcccggaacatggaccggctctcactggatgaggagcactacaaccggcaggaggagtggcggcggcagctccccgagagcctgggcgaggggcttcgacagggcctgtcccggctgggcatcagcctgcttggtgcaattgctggtatagttgatcagccgatgcagaacttccagaaaacatctgaggcacaggcttcagcaggacacaaggccaagggtgtcatctcgggtgtggggaaaggaatcatgggggtgttcacaaagcccatcggaggagctgctgagctggtgtcacagactggctatggtattttacatggagctggactttctcagcttcccaaacagcgccatcagccaagtgatctacatgctgaccaggctccaaacagccatgtcaaatatgtctggaaaatgcttcagtctctgggcagaccagaagtccacatggccctggacgtggttctggtgaggggctcaggccaggagcatgaagggtgcttgctgctgacatcagaagtgctcttcgtggtgagtgtcagtgaggacacacagcagcaggccttccccgtcacagaaatcgactgtgcacaggacagcaagcagaacaacttactcacagtgcagctcaagcagccaagagtggcctgtgatgtggaggtagatggagtccgagagagactgtcagagcaacagtacaacagactggtggactacatcacaaagacatcttgtcacctggcccccagctgttcttccatgcaaataccatgccctgtggtggctgcagaacctcccccctccactgttaaaacataccattacctggttgatccacattttgctcaggtcttccttagtaaatttaccatggtgaaaaataaagccctgaggaaagggtttccttgagtcccctctgaggtgtttattcctgcttgtgtgatttagtttttgggtttctttgagacagggtctcactgcattgcccttgctgacctcaaattctggggttcaagcaatcctcccacctcaacccacaagtagctacgactgcaagcacctgccaccataaagggctgcattttgccaccataaagggctgcatttttttaaaaagcctaggcagctctaacatcatctgatatggacacaaggccaacagtttccttatttacatccttacctctaaaagatacttcaaagtgacaaaaacgtgttccttccccacttagagacaatgattaacagggccctatatgttcttaccacatacagaggatgcatttatttttgctctatgacacttgcaaaaatctctactgtaattaatttgggtctattattaactctctgttccatcatagaatgtggccaggccttacaatggagagccagagttaaaacttcaagttgcatctgtttttgggctgagtcaccacctttgcctcatgctcctttgtctgcaaaggcctaggattctttctttaaatgaaatgcttaggactttgtggcttgttacatttgtcatttaactgcagtgctattctttgaaagctgctatgtgtattttctctgaagtctgcattttactaaaatttacaacagtctgatgattgattgattactgtccaggtacattttagaaaaagtgttcttcttccagtttgttttactaagcaaactttgagtaaatcctttgtcctatattgaatccagtcccaaagtgttcaggtgagtttctctagttccataaacaaaacatacatagtgggaactccctggtatgccatagagcacacaagaaccccaatattaatgctaacaattataccagtccattttgtttattctgtggaattgacttgacaaagcatgaagatattcccagtgtctgtctgataatattttgcatctaagaatgggtttgactcaagatcttgggttaccaagatgtcttaaatgttcagtaaatatctttcttacagtccagtagcttagagcatgtttgctgattgatattacatttaaacttggggctacagcttgttacctagaattttgagatactaagagaatgcaattttaaatgcccactggttttatttgttttggagagagggtctcattctgtcacccaggctagagtacagtgggaacagtcatggctcactgcagcttaagctcactgcctgggctcaagtgatcttactccagcctcccaagcagctgggactacaccaccacaggtatgcaccaccatacctggctgatttttaaaattttttctagagatgaggtctcactatgttgcccagctggtctcatactcctcagttcacgcattcctcccacctccacctcccaaactgctgggattacaggtgtgagccaccatgcccaacacccactgatctttaactctcacatgttgggcataagaagtcactatataattgttactggaaagcaagacttaacgaacaattctgactatgaaaaatgtctctttcagtttgttctgtaaatatttagaaaagtgacagctgtcaacctcagagtaactatttctaaaaatgtaaatatgtattaatccttgtatcttttatggtaattttgcatattgatatgaattatataaaattgtttaaaataaaaggtgtccttgaattactgaccacccatagatgtctactgttaccaggttttacaatgcaaattttcactaatacctgggtttaatacagctcacatcactgaatgttacacatgagtttaaatgggtaatatacaggttttgttataataaagttactgattaaattagctttg

SEQ ID NO: 331 - DNA, 1384 bp, Homo sapiens
gtaagaaacggttgaactggatgcaatttttatcacagcttgtgtaagactgcctctgtccctcctctcacatgccattggttaaccagcagacagtgtgctcaggggcgttgccagctcattgctcttatagcctgtgagggaggaagaaagaaacatttgccagccaggctagtgacagaaatggattcgaaatatcagtgtgtgaagctgaatgatggtcacttcatgcctgtcctgggatttggcacctatgcgcctgcagaggttcctaaaagtaaagctttagaggccaccaaattggcaattgaagctggcttccgccatattgattctgctcatttatacaataatgaggagcaggttggactggccatccgaagcaagattgcagatggcagtgtgaagagagaagacatattctacacttcaaagctttggtgcaattcccatcgaccagagttggtccgaccagccttggaaaggtcactgaaaaatcttcaattggattatgttgacctctaccttattcattttccagtgtctgtaaagccaggtgaggaagtgatcccaaaagatgaaaatggaaaaatactatttgacacagtggatctctgtgccacatgggaggccgtggagaagtgtaaagatgcaggattggccaagtccatcggggtgtccaacttcaaccgcaggcagctggagatgatcctcaacaagccagggctcaagtacaagcctgtctgcaaccaggtggaatgtcatccttacttcaaccagagaaaactgctggatttctgcaagtcaaaagacattgttctggttgcctatagtgctctgggatcccaccgagaagaaccatgggtggacccgaactccccggtgctcttggaggacccagtcctttgtgccttggcaaaaaagcacaagcgaaccccagccctgattgccctgcgctaccagctacagcgtggggttgtggtcctggccaagagctacaatgagcagcgcatcagacagaacgtgcaggtgtttgaattccagttgacttcagaggagatgaaagccatagatggcctaaacagaaatgtgcgatatttgacccttgatatttttgctggcccccctaattatccattttctgatgaatattaacatggagggcattgcatgaggtctgccagaaggccctgcgtgtggatggtgacacagaggatggctctatgctggtgactggacacatcgcctctggttaaatctctcctgcttggtgatttcagcaagctacagcaaagcccattggccagaaaggaaagacaataattttgttttttcattttgaaaaaattaaatgctctctcctaaagattcttcacctaaaaaa

SEQ ID NO: 332 - DNA, 1192 bp, Homo sapiens
acaggatctgcttagtgaaagaagtggcaagcaatggatcccaaatatcagcgtgtagagctaaatgatggtcacttcatgcccgtattgggatttggcacctatgcacctccagaggttccgaggaacagagctgtagaggtcaccaaattagcaatagaagctggcttccgccatattgattctgcttatttatacaataatgaggagcaggttggactggccatccgaagcaagattgcagatggcagtgtgaagagagaagacatattctacacttcaaagctttggtgcactttctttcaaccacagatggtccaaccagccttggaaagctcactgaaaaaacttcaactggactatgttgacctctatcttcttcatttcccaatggctctcaagccaggtgagacgccactaccaaaagatgaaaatggaaaagtaatattcgacacagtggatctctctgccacatgggaggtcatggagaagtgtaaggatgcaggattggccaagtccatcggggtgtcaaacttcaactgcaggcagctggagatgatcctcaacaagccaggactcaagtacaagcctgtctgcaaccaggtagaatgtcatccttacctcaaccagagcaaactgctggatttctgcaagtcaaaagacattgttctggttgcccacagtgctctgggaacccaacgacataaactatgggtggacccaaactccccagttcttttggaggacccagttctttgtgccttagcaaagaaacacaaacgaaccccagccctgattgccctgcgctaccagctgcagcgtggggttgtggtcctggccaagagctacaatgagcagcggatcagagagaacatccaggtttttgaattccagttgacatcagaggatatgaaagttctagatggtctaaacagaaattatcgatatgttgtcatggattttcttatggaccatcctgattatccattttcagatgaatattagcatagagggtgttgcacgacatctagcagaaggccctgtgtgtggatggtgatgcagaggatgtctctatgctggtgactggacacacggcctctggttaaatccctcccctcctgcttggcaacttcagctagctagatatatccatggtccagaaagcaaacataataaatttttatcttgaagt

SEQ ID NO: 333 - DNA, 627 bp, Homo sapiens
agtctccggcgagttgttgcctgggctggacgtggttttgtctgctgcgcccgctcttcgcgctctcgtttcattttctgcagcgcgccacgaggatggcccacaagcagatctactactcggacaagtacttcgacgaacactacgagtaccggcatgttatgttacccagagaactttccaaacaagtacctaaaactcatctgatgtctgaagaggagtggaggagacttggtgtccaacagagtctaggctgggttcattacatgattcatgagccagaaccacatattcttctctttagacgacctcttccaaaagatcaacaaaaatgaagtttatctggggatcgtcaaatctttttcaaatttaatgtatatgtgtatataaggtagtattcagtgaatacttgagaaatgtacaaatctttcatccatacctgtgcatgagctgtattcttcacagcaacagagctcagttaaatgcaactgcaagtaggttactgtaagatgtttaagataaaagttcttccagtcagtttttctcttaagtgcctgtttgagtttactgaaacagtttacttttgttcaataaagtttgtatgttgcatttaaaaaaaaaaaaaaa

SEQ ID NO: 334 - DNA, 2723 bp, Homo sapiens
ggcggcgcttgattgggctgggggggccaaataaaagcgatggcgattgggctgccgcgtttggcgctcggtccggtcgcgtccgacacccggtgggactcagaaggcagtggagccccggcggcggcggcggcggcgcgcgggggcgacgcgcgggaacaacgcgagtcggcgcgcgggacgaagaataatcatgggccagactgggaagaaatctgagaagggaccagtttgttggcggaagcgtgtaaaatcagagtacatgcgactgagacagctcaagaggttcagacgagctgatgaagtaaagagtatgtttagttccaatcgtcagaaaattttggaaagaacggaaatcttaaaccaagaatggaaacagcgaaggatacagcctgtgcacatcctgacttctgtgagctcattgcgcgggactagggagtgttcggtgaccagtgacttggattttccaacacaagtcatcccattaaagactctgaatgcagttgcttcagtacccataatgtattcttggtctcccctacagcagaattttatggtggaagatgaaactgttttacataacattccttatatgggagatgaagttttagatcaggatggtactttcattgaagaactaataaaaaattatgatgggaaagtacacggggatagagaatgtgggtttataaatgatgaaatttttgtggagttggtgaatgcccttggtcaatataatgatgatgacgatgatgatgatggagacgatcctgaagaaagagaagaaaagcagaaagatctggaggatcaccgagatgataaagaaagccgcccacctcggaaatttccttctgataaaatttttgaagccatttcctcaatgtttccagataagggcacagcagaagaactaaaggaaaaatataaagaactcaccgaacagcagctcccaggcgcacttcctcctgaatgtacccccaacatagatggaccaaatgctaaatctgttcagagagagcaaagcttacactcctttcatacgcttttctgtaggcgatgttttaaatatgactgcttcctacatcgtaagtgcaattattcttttcatgcaacacccaacacttataagcggaagaacacagaaacagctctagacaacaaaccttgtggaccacagtgttaccagcatttggagggagcaaaggagtttgctgctgctctcaccgctgagcggataaagaccccaccaaaacgtccaggaggccgcagaagaggacggcttcccaataacagtagcaggcccagcacccccaccattaatgtgctggaatcaaaggatacagacagtgatagggaagcagggactgaaacggggggagagaacaatgataaagaagaagaagagaagaaagatgaaacttcgagctcctctgaagcaaattctcggtgtcaaacaccaataaagatgaagccaaatattgaacctcctgagaatgtggagtggagtggtgctgaagcctcaatgtttagagtcctcattggcacttactatgacaatttctgtgccattgctaggttaattgggaccaaaacatgtagacaggtgtatgagtttagagtcaaagaatctagcatcatagctccagctcccgctgaggatgtggatactcctccaaggaaaaagaagaggaaacaccggttgtgggctgcacactgcagaaagatacagctgaaaaaggacggctcctctaaccatgtttacaactatcaaccctgtgatcatccacggcagccttgtgacagttcgtgcccttgtgtgatagcacaaaatttttgtgaaaagttttgtcaatgtagttcagagtgtcaaaaccgctttccgggatgccgctgcaaagcacagtgcaacaccaagcagtgcccgtgctacctggctgtccgagagtgtgaccctgacctctgtcttacttgtggagccgctgaccattgggacagtaaaaatgtgtcctgcaagaactgcagtattcagcggggctccaaaaagcatctattgctggcaccatctgacgtggcaggctgggggatttttatcaaagatcctgtgcagaaaaatgaattcatctcagaatactgtggagagattatttctcaagatgaagctgacagaagagggaaagtgtatgataaatacatgtgcagctttctgttcaacttgaacaatgattttgtggtggatgcaacccgcaagggtaacaaaattcgttttgcaaatcattcggtaaatccaaactgctatgcaaaagttatgatggttaacggtgatcacaggataggtatttttgccaagagagccatccagactggcgaagagctgttttttgattacagatacagccaggctgatgccctgaagtatgtcggcatcgaaagagaaatggaaatcccttgacatctgctacctcctcccccctcctctgaaacagctgccttagcttcaggaacctcgagtactgtgggcaatttagaaaaagaacatgcagtttgaaattctgaatttgcaaagtactgtaagaataatttatagtaatgagtttaaaaatcaactttttattgccttctcaccagctgcaaagtgttttgtaccagtgaatttttgcaataatgcagtatggtacatttttcaactttgaataaagaatacttgaacttgtccttgttgaatc

SEQ ID NO: 335 - DNA, 2387 bp, Homo sapiens
agacacctctgccctcaccatgagcctctggcagcccctggtcctggtgctcctggtgctgggctgctgctttgctgcccccagacagcgccagtccacccttgtgctcttccctggagacctgagaaccaatctcaccgacaggcagctggcagaggaatacctgtaccgctatggttacactcgggtggcagagatgcgtggagagtcgaaatctctggggcctgcgctgctgcttctccagaagcaactgtccctgcccgagaccggtgagctggatagcgccacgctgaaggccatgcgaaccccacggtgcggggtcccagacctgggcagattccaaacctttgagggcgacctcaagtggcaccaccacaacatcacctattggatccaaaactactcggaagacttgccgcgggcggtgattgacgacgcctttgcccgcgccttcgcactgtggagcgcggtgacgccgctcaccttcactcgcgtgtacagccgggacgcagacatcgtcatccagtttggtgtcgcggagcacggagacgggtatcccttcgacgggaaggacgggctcctggcacacgcctttcctcctggccccggcattcagggagacgcccatttcgacgatgacgagttgtggtccctgggcaagggcgtcgtggttccaactcggtttggaaacgcagatggcgcggcctgccacttccccttcatcttcgagggccgctcctactctgcctgcaccaccgacggtcgctccgacggcttgccctggtgcagtaccacggccaactacgacaccgacgaccggtttggcttctgccccagcgagagactctacacccaggacggcaatgctgatgggaaaccctgccagtttccattcatcttccaaggccaatcctactccgcctgcaccacggacggtcgctccgacggctaccgctggtgcgccaccaccgccaactacgaccgggacaagctcttcggcttctgcccgacccgagctgactcgacggtgatggggggcaactcggcgggggagctgtgcgtcttccccttcactttcctgggtaaggagtactcgacctgtaccagcgagggccgcggagatgggcgcctctggtgcgctaccacctcgaactttgacagcgacaagaagtggggcttctgcccggaccaaggatacagtttgttcctcgtggcggcgcatgagttcggccacgcgctgggcttagatcattcctcagtgccggaggcgctcatgtaccctatgtaccgcttcactgaggggccccccttgcataaggacgacgtgaatggcatccggcacctctatggtcctcgccctgaacctgagccacggcctccaaccaccaccacaccgcagcccacggctcccccgacggtctgccccaccggaccccccactgtccacccctcagagcgccccacagctggccccacaggtcccccctcagctggccccacaggtccccccactgctggcccttctacggccactactgtgcctttgagtccggtggacgatgcctgcaacgtgaacatcttcgacgccatcgcggagattgggaaccagctgtatttgttcaaggatgggaagtactggcgattctctgagggcagggggagccggccgcagggccccttccttatcgccgacaagtggcccgcgctgccccgcaagctggactcggtctttgaggagcggctctccaagaagcttttcttcttctctgggcgccaggtgtgggtgtacacaggcgcgtcggtgctgggcccgaggcgtctggacaagctgggcctgggagccgacgtggcccaggtgaccggggccctccggagtggcagggggaagatgctgctgttcagcgggcggcgcctctggaggttcgacgtgaaggcgcagatggtggatccccggagcgccagcgaggtggaccggatgttccccggggtgcctttggacacgcacgacgtcttccagtaccgagagaaagcctatttctgccaggaccgcttctactggcgcgtgagttcccggagtgagttgaaccaggtggaccaagtgggctacgtgacctatgacatcctgcagtgccctgaggactagggctcccgtcctgctttggcagtgccatgtaaatccccactgggaccaaccctggggaaggagccagtttgccggatacaaactggtattctgttctggaggaaagggaggagtggaggtgggctgggccctctcttctcacctttgttttttgttggagtgtttctaataaacttggattctctaacctttaaaaaaaaaaaaaaaaaaaaaaaaaaaaaaaaaaaaaaaaaaaaaaaaaaaa

SEQ ID NO: 336 - DNA, 1369 bp, Homo sapiens
aaacaggaaataaatacgaatgaaactgagctctaagcagcatgtaacctggcctgcatccaggaaatagaggacttcggatccttctaaccctaccacccaactggccccagtacattcattctctcaggaaaaaaaacaaggtccccacagcaaagaaaaggaataggatcaagagatacgtggctgctggcagagcaagcatgaattcgatgacttcagcagttccggtggccaattctgtgttggtggtggcaccccacaatggttatcctgtgaccccaggaattatgtctcacgtgcccctgtatccaaacagccagccgcaagtccacctagttcctgggaacccacctagtttggtgtcgaatgtgaatgggcagcctgtgcagaaagctctgaaagaaggcaaaaccttgggggccatccagatcatcattggcctggctcacatcggcctcggctccatcatggcgacggttctcgtaggggaatacctgtctatttcattctacggaggctttcccttctggggaggcttgtggtttatcatttcaggatctctctccgtggcagcagaaaatcagccatattcttattgcctgctgtctggcagtttgggcttgaacatcgtcagtgcaatctgctctgcagttggagtcatactcttcatcacagatctaagtattccccacccatatgcctaccccgactattatccttacgcctggggtgtgaaccctggaatggcgatttctggcgtgctgctggtcttctgcctcctggagtttggcatcgcatgcgcatcttcccactttggctgccagttggtctgctgtcaatcaagcaatgtgagtgtcatctatccaaacatctatgcagcaaacccagtgatcaccccagaaccggtgacctcaccaccaagttattccagtgagatccaagcaaataagtaaggctacagattctggaagcatctttcactgggaccaaaagaagtcctcctccctttctgggcttccataacccaggtcgttcctgttctgacagctgaggaaacgtctctcccactgtttgtactctcaccttcattcttcaattcagtctaggaaaccatgctgtttctctatcaagaagaagacagagattttaaacagatgttaaccaagagggactccctagggcacatgcatcagcacatatgtgggcatccagcctctggggccttggcacacacacattcgtgtgctctgctgcatgtgagcttgtgggttagaggaacaaatatctagacattcaatcttcactctttcaattgtgcattcatttaataaatagatactgagcattcaaaaaaaaaaaaaaaaaa

SEQ ID NO: 337 - DNA, 1731 bp, Homo sapiens
aactgcagcgccggggctgggggaggggagcctactcactcccccaactcccgggcggtgactcatcaacgagcaccagcggccagaggtgagcagtcccgggaaggggccgagaggcggggccgccaggtcgggcaggtgtgcgctccgccccgccgcgcgcacagagcgctagtccttcggcgagcgagcaccttcgacgcggtccggggaccccctcgtcgctgtcctcccgacgcggacccgcgtgccccaggcctcgcgctgcccggccggctcctcgtgtcccactcccggcgcacgccctcccgcgagtcccgggcccctcccgcgcccctcttctcggcgcgcgcgcagcatggcgcccccgcaggtcctcgcgttcgggcttctgcttgccgcggcgacggcgacttttgccgcagctcaggaagaatgtgtctgtgaaaactacaagctggccgtaaactgctttgtgaataataatcgtcaatgccagtgtacttcagttggtgcacaaaatactgtcatttgctcaaagctggctgccaaatgtttggtgatgaaggcagaaatgaatggctcaaaacttgggagaagagcaaaacctgaaggggccctccagaacaatgatgggctttatgatcctgactgcgatgagagcgggctctttaaggccaagcagtgcaacggcacctccatgtgctggtgtgtgaacactgctggggtcagaagaacagacaaggacactgaaataacctgctctgagcgagtgagaacctactggatcatcattgaactaaaacacaaagcaagagaaaaaccttatgatagtaaaagtttgcggactgcacttcagaaggagatcacaacgcgttatcaactggatccaaaatttatcacgagtattttgtatgagaataatgttatcactattgatctggttcaaaattcttctcaaaaaactcagaatgatgtggacatagctgatgtggcttattattttgaaaaagatgttaaaggtgaatccttgtttcattctaagaaaatggacctgacagtaaatggggaacaactggatctggatcctggtcaaactttaatttattatgttgatgaaaaagcacctgaattctcaatgcagggtctaaaagctggtgttattgctgttattgtggttgtggtgatagcagttgttgctggaattgttgtgctggttatttccagaaagaagagaatggcaaagtatgagaaggctgagataaaggagatgggtgagatgcatagggaactcaatgcataactatataatttgaagattatagaagaagggaaatagcaaatggacacaaattacaaatgtgtgtgcgtgggacgaagacatctttgaaggtcatgagtttgttagtttaacatcatatatttgtaatagtgaaacctgtactcaaaatataagcagcttgaaactggctttaccaatcttgaaatttgaccacaagtgtcttatatatgcagatctaatgtaaaatccagaacttggactccatcgttaaaattatttatgtgtaacattcaaatgtgtgcattaaatatgcttccacagtaaaatctgaaaaactgatttgtgattgaaagctgcctttctatttacttgagtcttgtacatacatacttttttatgagctatgaaataaaacattttaaactgaatttcttaaaaaaaaaaaaaaa

SEQ ID NO: 338 - DNA, 586 bp, Homo sapiens
agttaaaagggtgggagcgtccgggggcccatctctctcgggtggagtcttctgacagctggtgcgcctgcccgggaacatcctcctggactcaatcatggcttgtggtctggtcgccagcaacctgaatctcaaacctggagagtgccttcgagtgcgaggcgaggtggctcctgacgctaagagcttcgtgctgaacctgggcaaagacagcaacaacctgtgcctgcacttcaaccctcgcttcaacgcccacggcgacgccaacaccatcgtgtgcaacagcaaggacggcggggcctgggggaccgagcagcgggaggctgtctttcccttccagcctggaagtgttgcagaggtgtgcatcaccttcgaccaggccaacctgaccgtcaagctgccagatggatacgaattcaagttccccaaccgcctcaacctggaggccatcaactacatggcagctgacggtgacttcaagatcaaatgtgtggcctttgactgaaatcagccagcccatggcccccaataaaggcagctgcctctgctccctctgaaaaaaaaaaaaaaaaaaaaaaaaaaaaaa

SEQ ID NO: 339 - DNA, 3621 bp, Homo sapiens
tcataatagaattctcatgagatctggttgtttgaaagtgtgtagcacctccaccttctctctctctctccctctccctctcctgccagccaagtgaagacatgcttacttccccttcaccttccttcatgatgttaccattggaatgacatactgcatcctatagttataccatccactctgaaatcaatgtgaatttaacttcagttccatacagaaacttcttttccacaggtaagaaacggttgaactggatgcaatttttatcacagcttgtgtaagactgcctctgtccctcctctcacatgccattggttaaccagcagacagtgtgctcaggggcgttgccagctcattgctcttatagcctgtgagggaggaagaaacatttgctaaccaggccagtgacagaaatggattcgaaataccagtgtgtgaagctgaatgatggtcacttcatgcctgtcctgggatttggcacctatgcgcctgcagaggttcctaaaagtaaagctctagaggccgtcaaattggcaatagaagccgggttccaccatattgattctgcacatgtttacaataatgaggagcaggttggactggccatccgaagcaagattgcagatggcagtgtgaagagagaagacatattctacacttcaaagctttggagcaattcccatcgaccagagttggtccgaccagccttggaaaggtcactgaaaaatcttcaattggactatgttgacctctatcttattcattttccagtgtctgtaaagccaggtgaggaagtgatcccaaaagatgaaaatggaaaaatactatttgacacagtggatctctgtgccacatgggaggccatggagaagtgtaaagatgcaggattggccaagtccatcggggtgtccaacttcaaccacaggctgctggagatgatcctcaacaagccagggctcaagtacaagcctgtctgcaaccaggtggaatgtcatccttacttcaaccagagaaaactgctggatttctgcaagtcaaaagacattgttctggttgcctatagtgctctgggatcccatcgagaagaaccatgggtggacccgaactccccggtgctcttggaggacccagtcctttgtgccttggcaaaaaagcacaagcgaaccccagccctgattgccctgcgctaccagctgcagcgtggggttgtggtcctggccaagagctacaatgagcagcgcatcagacagaacgtgcaggtgtttgaattccagttgacttcagaggagatgaaagccatagatggcctaaacagaaatgtgcgatatttgacccttgatatttttgctggcccccctaattatccattttctgatgaatattaacatggagggcattgcatgaggtctgccagaaggccctgcgtgtggatggtgacacagaggatggctctatgctggtgactggacacatcgcctctggttaaatctctcctgcttggcgacttcagtaagctacagctaagcccatcggccggaaaagaaagacaataattttgtttttcattttgaaaaaattaaatgctctctcctaaagattcttcacctactttggtctccataacttctatgttttctctccttctgacacactagtgcccccaaattgtgatttgcctatacgtttagggccggggttggaagatgttaacaaccatttaagattcatttctgcagtgggagtgggtggagtttcaccctctgggaaaggggcaggtgacaggtatttatcagtcagtgcctctctagctcttgtaggaagaagcacacgcaggatggagtctagaggatgagcgatattgactagcaattcatgggctccctccagcagtgcgagggtcagagtttctggagccttgggaggaggcatccctgtgagggggggttagggagatgggagggcaccaggaaaagtgattagaagtcaggtatgggaaggctaaataggacagagtcgagtacatctctgcttggaaaaacatatcaacacccttttttttgatcattatatcttgttcataaaagaaaactttccacattgttttaacaaaccccacagctgagagtcaggcctgaatctttgatgtgtgcccattcacaacgttgaccctattggtttgtggtggggcaggacatcgaagatatcattgactcatcacattcccctgaatagctcatatttagaaaatattcttagattgtaaaaatgtactgttcatttgttatatgcaatcttttaaatgttttatactttaaacaaggcatagttacaagtataaaacataaatatcccaaagccattatgcatggcactcaagattaaaatgggaaataatacatctaataaatcaaatgttccaagacttcaaatgtcttttggaaacaggctatgtaaaacagcacactggtttcaaactttggtaaattttaagaagaactcttacaaaggcatttaattcttatacataattttcaggggaactaatcaaatcagctaatcatgaagacatgattttcgttttagaaaacacttttgaaaacttgggataatctcatgtcttaatgatcaaagcattatgagaaggacagtggttttttacctgggcacactttctaacacatttactctccactattcgtactctggtagccatgttaaccccatcagagattccttctcaagccatgtctcagagctgataggcatcccagcaagttttgcagctcacaatttttctgtaaattacttattctataaaattggaagaggccataaactttggagggccctagaccaattttttggattatttctggtctactctcattccgttgatgatcttagatattctctgcattaaatatcacctctaggctgagaaatccaccaaaaaatatttctagctcagcgttttcctccaaatcttcaatggaagatcataatgtgaactctgcatctccatgttaaagtttaatggacattcacacttagcatgtctcaaagaaatctcatgtaaaccatggccatcctgttctaccttaactttctgagtctatggaatgataatttcacatctcataaacttgactgatgtaagtgtcaagaaaagattgacattttgttaaaacttcgtagccaagtgtgtaacgcttaagcagactttcatatttcaaatctctatagcacgtgtaactcttttttcaagatgtgaaataatcattaggtcagtcatttgtaaatagtacggctgctgtgggctttttccagttcttcaccatccatttttataaaactcttattgttaaaaaaaaaaagttactcagaatttcataaagccaaacacctgatttcaggaacacttgagatgtaagaaaattttatagggacctccaatcactaattttcctattttttctctcaaagaaatgctgaagggaggaattcaggttgaatgaaaggaaatagtaacttacagccatatagagttataaagacttcttgtaaatgtgaacatatggtaaaatataaaaacatgtatttttgaaaaaaaaaaaaaaaaaa

SEQ ID NO: 340 - DNA, 4293 bp, Homo sapiens
gtttctcatagttggcgtcttctaaaggaaaaacactaaaatgaggaactcagcggaccgggagcgacgcagcttgagggaagcatccctagctgttggcgcagaggggcgaggctgaagccgagtggcccgaggtgtctgaggggctggggcaaaggtgaaagagtttcagaacaagcttcctggaacccatgacccatgaagtcttgtcgacatttataccgtctgagggtagcagctcgaaagtagaagaagtggagtgttgccagggacggcagtatctctttgtgtgaccctggcggcttatgggacgttggcttcagacctttgtgatacaccatgctgcgtgggacgatgacggcgtggagaggaatgaggcctgaggtcacactggcttgcctcctcctagccacagcaggctgctttgctgacttgaacgaggtccctcaggtcaccgtccagcctgcgtccaccgtccagaagcccggaggcactgtgatcttgggctgcgtggtggaacctccaaggatgaatgtaacctggcgcctgaatggaaaggagctgaatggctcggatgatgctctgggtgtcctcatcacccacgggaccctcgtcatcactgcccttaacaaccacactgtgggacggtaccagtgtgtggcccggatgcctgcgggggctgtggccagcgtgccagccactgtgacactagccaatctccaggacttcaagttagatgtgcagcacgtgattgaagtggatgagggaaacacagcagtcattgcctgccacctgcctgagagccaccccaaagcccaggtccggtacagcgtcaaacaagagtggctggaggcctccagaggtaactacctgatcatgccctcagggaacctccagattgtgaatgccagccaggaggacgagggcatgtacaagtgtgcagcctacaacccagtgacccaggaagtgaaaacctccggctccagcgacaggctacgtgtgcgccgctccaccgctgaggctgcccgcatcatctaccccccagaggcccaaaccatcatcgtcaccaaaggccagagtctcattctggagtgtgtggccagtggaatcccacccccacgggtcacctgggccaaggatgggtccagtgtcaccggctacaacaagacgcgcttcctgctgagcaacctcctcatcgacaccaccagcgaggaggactcaggcacctaccgctgcatggccgacaatggggttgggcagcccggggcagcggtcatcctctacaatgtccaggtgtttgaaccccctgaggtcaccatggagctatcccagctggtcatcccctggggccagagtgccaagcttacctgtgaggtgcgtgggaaccccccgccctccgtgctgtggctgaggaatgctgtgcccctcatctccagccagcgcctccggctctcccgcagggccctgcgcgtgctcagcatggggcctgaggacgaaggcgtctaccagtgcatggccgagaacgaggttgggagcgcccatgccgtagtccagctgcggacctccaggccaagcataaccccaaggctatggcaggatgctgagctggctactggcacacctcctgtatcaccctccaaactcggcaaccctgagcagatgctgagggggcaaccggcgctccccagacccccaacgtcagtggggcctgcttccccgcagtgtccaggagagaaggggcagggggctcccgccgaggctcccatcatcctcagctcgccccgcacctccaagacagactcatatgaactggtgtggcggcctcggcatgagggcagtggccgggcgccaatcctctactatgtggtgaaacaccgcaaggtcacaaattcctctgacgattggaccatctctggcattccagccaaccagcaccgcctgaccctcaccagacttgaccccgggagcttgtatgaagtggagatggcagcttacaactgtgcgggagagggccagacagccatggtcaccttccgaactggacggcggcccaaacccgagatcatggccagcaaagagcagcagatccagagagacgaccctggagccagtccccagagcagcagccagccagaccacggccgcctctcccccccagaagctcccgacaggcccaccatctccacggcctccgagacctcagtgtacgtgacctggattccccgtgggaatggtgggttcccaatccagtccttccgtgtggagtacaagaagctaaagaaagtgggagactggattctggccaccagcgccatccccccatcgcggctgtccgtggagatcacgggcctagagaaaggcacctcctacaagtttcgagtccgggctctgaacatgctgggggagagcgagcccagcgccccctctcggccctacgtggtgtcgggctacagcggtcgcgtgtacgagaggcccgtggcaggtccttatatcaccttcacggatgcggtcaatgagaccaccatcatgctcaagtggatgtacatcccagcaagtaacaacaacaccccaatccatggcttttatatctattatcgacccacagacagtgacaatgatagtgactacaagaaggatatggtggaaggggacaagtactggcactccatcagccacctgcagccagagacctcctacgacattaagatgcagtgcttcaatgaaggaggggagagcgagttcagcaacgtgatgatctgtgagaccaaagctcggaagtcttctggccagcctggtcgactgccacccccaactctggccccaccacagccgccccttcctgaaaccatagagcggccggtgggcactggggccatggtggctcgctccagcgacctgccctatctgattgtcggggtcgtcctgggctccatcgttctcatcatcgtcaccttcatccccttctgcttgtggagggcctggtctaagcaaaaacatacaacagacctgggttttcctcgaagtgcccttccaccctcctgcccgtatactatggtgccattgggaggactcccaggccaccaggccagtggacagccctacctcagtggcatcagtggacgggcctgtgctaatgggatccacatgaataggggctgcccctcggctgcagtgggctacccgggcatgaagccccagcagcactgcccaggcgagcttcagcagcagagtgacaccagcagcctgctgaggcagacccatcttggcaatggatatgacccccaaagtcaccagatcacgaggggtcccaagtctagcccggacgagggctctttcttatacacactgcccgacgactccactcaccagctgctgcagccccatcacgactgctgccaacgccaggagcagcctgctgctgtgggccagtcaggggtgaggagagcccccgacagtcctgtcctggaagcagtgtgggaccctccatttcactcagggcccccatgctgcttgggccttgtgccagttgaagaggtggacagtcctgactcctgccaagtgagtggaggagactggtgtccccagcaccccgtaggggcctacgtaggacaggaacctggaatgcagctctccccggggccactggtgcgtgtgtcttttgaaacaccacctctcacaatttaggcagaagctgatatcccagaaagactatatattgttttttttttaaaaaaaaaaagaagaaaaaagagacagagaaaattggtatttatttttctattatagccatatttatatatttatgcacttgtaaataaatgtatatgttttataattctggagagacataaggagtcctacccgttgaggttggagagggaaaataaagaagctgccacctaacaggagtcacccaggaaagcaccgcacaggctggcgcgggacagactcctaacctggggcctctgcagtggcaggcgaggctgcaggaggcccacagataagctggcaagaggaaggatcccaggcacatggttcatcacgagcatgagggaacagcaaggggcacggtatcacagcctggagacacccacacagatggctggatccggtgctacgggaaacattttcctaagatgcccatgagaacagaccaagatgtgtacagcactatgagcattaaaaaaccttccagaatcaataatccgtggcaacatatctctgtaaaaacaaacactgtaacttctaaataaatgtttagtcttccctgtaaccttcaaaaaaaaaaaaaaa

SEQ ID NO: 341 - DNA, 1260 bp, Homo sapiens
ggccggcgggaagactccgttacccagcgagcgaggcggcggcgcagggccagcggactccatttcccgtcggctcgcggtgggagcgccggaagcccgccccacccctcattgtgcggctcctactaaacggaaggggccgggagaggccgcgttcagtcgggtcccggcagcggctgcagcgctctcgtcttctgcggctctcggtgccctctccttttcgtttccggaaacatggcctccggtgtggctgtctctgatggtgtcatcaaggtgttcaacgacatgaaggtgcgtaagtcttcaacgccagaggaggtgaagaagcgcaagaaggcggtgctcttctgcctgagtgaggacaagaagaacatcatcctggaggagggcaaggagatcctggtgggcgatgtgggccagactgtcgacgacccctacgccacctttgtcaagatgctgccagataaggactgccgctatgccctctatgatgcaacctatgagaccaaggagagcaagaaggaggatctggtgtttatcttctgggcccccgagtctgcgccccttaagagcaaaatgatttatgccagctccaaggacgccatcaagaagaagctgacagggatcaagcatgaattgcaagcaaactgctacgaggaggtcaaggaccgctgcaccctggcagagaagctggggggcagtgccgtcatctccctggagggcaagcctttgtgagccccttctggccccctgcctggagcatctggcagccccacacctgcccttgggggttgcaggctgcccccttcctgccagaccggaggggctggggggatcccagcagggggagggcaatcccttcaccccagttgccaaacagaccccccaccccctggattttccttctccctccatcccttgacggttctggccttcccaaactgcttttgatcttttgattcctcttgggctgaagcagaccaagttccccccaggcaccccagttgtgggggagcctgtattttttttaacaacatccccattccccacctggtcctcccccttcccatgctgccaacttctaaccgcaatagtgactctgtgcttgtctgtttagttctgtgtataaatggaatgttgtggagatgacccctccctgtgccggctggttcctctcccttttcccctggtcacggctactcatggaagcaggaccagtaagggaccttcgattaaaaaaaaaaaagacaataataaaaa

SEQ ID NO: 342 - DNA, 956 bp, Homo sapiens
gggcggagcagctgaaaatccggcgcgcgcagtctccagccccaatttctacgcgcaccggaagacggaggtcctctttccttgcctaacgcagccatggctcgtggtcccaagaagcatctgaagcgggtggcagctccaaagcattggatgctggataaattgaccggtgtgtttgctcctcgtccatccaccggtccccacaagttgagagagtgtctccccctcatcattttcctgaggaacagacttaagtatgccctgacaggagatgaagtaaagaagatttgcatgcagcggttcattaaaatcgatggcaaggtccgaactgatataacctaccctgctggattcatggatgtcatcagcattgacaagacgggagagaatttccgtctgatctatgacaccaagggtcgctttgctgtacatcgtattacacctgaggaggccaagtacaagttgtgcaaagtgagaaagatctttgtgggcacaaaaggaatccctcatctggtgactcatgatgcccgcaccatccgctaccccgatcccctcatcaaggtgaatgataccattcagattgatttggagactggcaagattactgatttcatcaagttcgacactggtaacctgtgtatggtgactggaggtgctaacctaggaagaattggtgtgatcaccaacagagagaggcaccctggatcttttgacgtggttcacgtgaaagatgccaatggcaacagctttgccactcgactttccaacatttttgttattggcaagggcaacaaaccatggatttctcttccccgaggaaagggtatccgcctcaccattgctgaagagagagacaaaagactggcggccaaacagagcagtgggtgaaatgggtccctgggtgacatgtcagatctttgtacgtaattaaaaatattgtggcaggattaatagca

SEQ ID NO: 343 - DNA, 2751 bp, Homo sapiens
ccctttactcctggctgcggggcgagccgggcgtctgctgcagcggccgcggtggctgaggaggcccgagaggagtcggtggcagcggcggcggcgggaccggcagcagcagcagcagcagcagcagcagcaaccactagcctcctgccccgcggcgctgccgcacgagccccacgagccgctcaccccgccgttctcagcgctgcccgaccccgctggcgcgccctcccgccgccagtcccggcagcgccctcagttgtcctccgactcgccctcggccttccgcgccagccgcagccacagccgcaacgccacccgcagccacagccacagccacagccccaggcatagccttcggcacagccccggctccggctcctgcggcagctcctctgggcaccgtccctgcgccgacatcctggaggttgggatgctcttgtccaaaatcaactcgcttgcccacctgcgcgccgcgccctgcaacgacctgcacgccaccaagctggcgcccggcaaggagaaggagcccctggagtcgcagtaccaggtgggcccgctactgggcagcggcggcttcggctcggtctactcaggcatccgcgtctccgacaacttgccggtggccatcaaacacgtggagaaggaccggatttccgactggggagagctgcctaatggcactcgagtgcccatggaagtggtcctgctgaagaaggtgagctcgggtttctccggcgtcattaggctcctggactggttcgagaggcccgacagtttcgtcctgatcctggagaggcccgagccggtgcaagatctcttcgacttcatcacggaaaggggagccctgcaagaggagctggcccgcagcttcttctggcaggtgctggaggccgtgcggcactgccacaactgcggggtgctccaccgcgacatcaaggacgaaaacatccttatcgacctcaatcgcggcgagctcaagctcatcgacttcgggtcgggggcgctgctcaaggacaccgtctacacggacttcgatgggacccgagtgtatagccctccagagtggatccgctaccatcgctaccatggcaggtcggcggcagtctggtccctggggatcctgctgtatgatatggtgtgtggagatattcctttcgagcatgacgaagagatcatcaggggccaggttttcttcaggcagagggtctcttcagaatgtcagcatctcattagatggtgcttggccctgagaccatcagataggccaaccttcgaagaaatccagaaccatccatggatgcaagatgttctcctgccccaggaaactgctgagatccacctccacagcctgtcgccggggcccagcaaatagcagcctttctggcaggtcctcccctctcttgtcagatgcccgagggaggggaagcttctgtctccagcttcccgagtaccagtgacacgtctcgccaagcaggacagtgcttgatacaggaacaacatttacaactcattccagatcccaggcccctggaggctgcctcccaacagtggggaagagtgactctccaggggtcctaggcctcaactcctcccatagatactctcttcttctcataggtgtccagcattgctggactctgaaatatcccgggggtggggggtgggggtgggtcagaaccctgccatggaactgtttccttcatcatgagttctgctgaatgccgcgatgggtcaggtaggggggaaacaggttgggatgggataggactagcaccattttaagtccctgtcacctcttccgactctttctgagtgccttctgtggggactccggctgtgctgggagaaatacttgaacttgcctcttttacctgctgcttctccaaaaatctgcctgggttttgttccctatttttctctcctgtcctccctcaccccctccttcatatgaaaggtgccatggaagaggctacagggccaaacgctgagccacctgcccttttttctgcctcctttagtaaaactccgagtgaactggtcttcctttttggtttttacttaactgtttcaaagccaagacctcacacacacaaaaaatgcacaaacaatgcaatcaacagaaaagctgtaaatgtgtgtacagttggcatggtagtatacaaaaagattgtagtggatctaatttttaagaaattttgcctttaagttattttacctgtttttgtttcttgttttgaaagatgcgcattctaacctggaggtcaatgttatgtatttatttatttatttatttggttcccttcctattccaagcttccatagctgctgccctagttttctttcctcctttcctcctctgacttggggaccttttgggggagggctgcgacgcttgctctgtttgtggggtgacgggactcaggcgggacagtgctgcagctccctggcttctgtggggcccctcacctacttacccaggtgggtcccggctctgtgggtgatggggaggggcattgctgactgtgtatataggataattatgaaaagcagttctggatggtgtgccttccagatcctctctggggctgtgttttgagcagcaggtagcctgctggttttatctgagtgaaatactgtacaggggaataaaagagatcttatttttttttttatacttggcgttttttgaataaaaaccttttgtcttaaaaaaaaaaaaaaaaaaaaaaaaaaaaaaaaaaaaaaaaaaaa

SEQ ID NO: 344 - DNA, 3309 bp, Homo sapiens
ttcagcccctctcccgggctgcgcctccgcactccgggcccgggcagaagggggtgcgcctcggccccaccacccagggagcagccgagctgaaaggccgggaaccgcggcttgcggggaccacagctcccgaaagcgacgttcggccaccggaggagcgggagccaagcaggcggagctcggcgggagaggtgcgggccgaatccgagccgagcggagaggaatccggcagtagagagcggactccagccggcggaccctgcagccctcgcctgggacagcggcgcgctgggcaggcgcccaagagagcatcgagcagcggaacccgcgaagccggcccgcagccgcgacccgcgcagcctgccgctctcccgccgccggtccgggcagcatgaggcgcgcggcgctctggctctggctgtgcgcgctggcgctgagcctgcagccggccctgccgcaaattgtggctactaatttgccccctgaagatcaagatggctctggggatgactctgacaacttctccggctcaggtgcaggtgctttgcaagatatcaccttgtcacagcagaccccctccacttggaaggacacgcagctcctgacggctattcccacgtctccagaacccaccggcctggaggctacagctgcctccacctccaccctgccggctggagaggggcccaaggagggagaggctgtagtcctgccagaagtggagcctggcctcaccgcccgggagcaggaggccaccccccgacccagggagaccacacagctcccgaccactcatcaggcctcaacgaccacagccaccacggcccaggagcccgccacctcccacccccacagggacatgcagcctggccaccatgagacctcaacccctgcaggacccagccaagctgaccttcacactccccacacagaggatggaggtccttctgccaccgagagggctgctgaggatggagcctccagtcagctcccagcagcagagggctctggggagcaggacttcacctttgaaacctcgggggagaatacggctgtagtggccgtggagcctgaccgccggaaccagtccccagtggatcagggggccacgggggcctcacagggcctcctggacaggaaagaggtgctgggaggggtcattgccggaggcctcgtggggctcatctttgctgtgtgcctggtgggtttcatgctgtaccgcatgaagaagaaggacgaaggcagctactccttggaggagccgaaacaagccaacggcggggcctaccagaagcccaccaaacaggaggaattctatgcctgacgcgggagccatgcgccccctccgccctgccactcactaggcccccacttgcctcttccttgaagaactgcaggccctggcctcccctgccaccaggccacctccccagcattccagcccctctggtcgctcctgcccacggagtcgtggggtgtgctgggagctccactctgcttctctgacttctgcctggagacttagggcaccaggggtttctcgcataggacctttccaccacagccagcacctggcatcgcaccattctgactcggtttctccaaactgaagcagcctctccccaggtccagctctggaggggagggggatccgactgctttggacctaaatggcctcatgtggctggaagatcctgcgggtggggcttggggctcacacacctgtagcacttactggtaggaccaagcatcttgggggggtggccgctgagtggcaggggacaggagtccactttgtttcgtggggaggtctaatctagatatcgacttgtttttgcacatgtttcctctagttctttgttcatagcccagtagaccttgttacttctgaggtaagttaagtaagttgattcggtatccccccatcttgcttccctaatctatggtcgggagacagcatcagggttaagaagactttttttttttttttttaaactaggagaaccaaatctggaagccaaaatgtaggcttagtttgtgtgttgtctcttgagtttgtcgctcatgtgtgcaacagggtatggactatctgtctggtggccccgtttctggtggtctgttggcaggctggccagtccaggctgccgtggggccgccgcctctttcaagcagtcgtgcctgtgtccatgcgctcagggccatgctgaggcctgggccgctgccacgttggagaagcccgtgtgagaagtgaatgctgggactcagccttcagacagagaggactgtagggagggcggcaggggcctggagatcctcctgcagaccacgcccgtcctgcctgtggcgccgtctccaggggctgcttcctcctggaaattgacgaggggtgtcttgggcagagctggctctgagcgcctccatccaaggccaggttctccgttagctcctgtggccccaccctgggccctgggctggaatcaggaatattttccaaagagtgatagtcttttgcttttggcaaaactctacttaatccaatgggtttttccctgtacagtagattttccaaatgtaataaactttaatataaagtagtcctgtgaatgccactgccttcgcttcttgcctctgtgctgtgtgtgacgtgaccggacttttctgcaaacaccaacatgttgggaaacttggctcgaatctctgtgccttcgtctttcccatggggagggattctggttccagggtccctctgtgtatttgcttttttgttttggctgaaattctcctggaggtcggtaggttcagccaaggttttataaggctgatgtcaatttctgtgttgccaagctccaagccccatcttctaaatggcaaaggaaggtggatggccccagcacagcttgacctgaggctgtggtcacagcggaggtgtggagccgaggcctaccccgcagacaccttggacatcctcctcccacccggctgcagaggccagaggcccccagcccagggctcctgcacttacttgcttatttgacaacgtttcagcgactccgttggccactccgagaggtgggccagtctgtggatcagagatgcaccaccaagccaagggaacctgtgtccggtattcgatactgcgactttctgcctggagtgtatgactgcacatgactcgggggtggggaaaggggtcggctgaccatgctcatctgctggtccgtgggacggtgcccaagccagaggctgggttcatttgtgtaacgacaataaacggtacttgtcatttcgggcaaaaaaaaaaaaaaaaaa

SEQ ID NO: 345 - DNA, 3520 bp, Homo sapiens
aattcccagcaggccttgggcctcagtgcggccgcgaagcagagcgggctgtagagccttgcgcgcgcagtggggatggaacgttgctaggcttagcgggtctggctgctgggggcccgagcagcacgctcggagccgccgcgcgccaaagcgggaatctgggaggcgagcagctctgcagttaatgcacgtattttaaactcccgggcctgcggacgctatgcacaggaagcacctccaggagattccagacctgagtagcaacgttgccaccagcttcacgtggggatgggattccagcaagacttctgaactgctgtcaggcatgggggtctccgccctggagaaagaggagcccgacagtgagaacatcccccaggaactgctctcaaacctgggccacccggagagccccccacggaaacggctgaagagcaaagggagtgacaaagactttgtgattgtccgcaggcctaagctaaatcgagagaactttccaggtgtttcatgggactcccttccggatgagctgctcttgggaatcttttcctgtctgtgcctccctgagctgctaaaggtctctggtgtttgtaagaggtggtatcgcctagcgtctgatgagtctctatggcagaccttagacctcacaggtaaaaatctgcacccggatgtgactggtcggttgctgtctcaaggggtgattgccttccgctgcccacgatcatttatggaccaaccattggctgaacatttcagcccttttcgtgtacagcacatggacctatcgaactcagttatagaagtgtccaccctccacggcatactgtctcagtgttccaagttgcagaatctaagcctggaaggcctgcggctttcggatcccattgtcaatactctcgcaaaaaactcaaatttagtgcgacttaacctttctgggtgttctggattctctgaatttgccctgcagactttgctaagcagctgttccagactggatgagctgaacctctcctggtgttttgatttcactgaaaagcatgtacaggtggctgttgcgcatgtgtcagagaccatcacccagctgaatcttagcggctacagaaagaatctccagaaatcagatctctctactttagttagaagatgccccaatcttgtccatctagacttaagtgatagtgtcatgctaaagaatgactgctttcaggaatttttccagctcaactacctccaacacctatcactcagtcggtgctatgatataatacctgaaactttacttgaacttggagaaattcccacactaaaaacactacaagtttttggaatcgtgccagatggtacccttcaactgttaaaggaagcccttcctcatctacagattaattgctcccatttcaccaccattgccaggccaactattggcaacaaaaagaaccaggagatatggggcatcaaatgccgactgacactgcaaaagcccagttgtctatgaagtatttattgcaggatggtgtctcttctttagaacagggaaaataggcaggaagcccaattgctggagtacttagctagttttattcttggttttccctttgccttcattctgcaagtatactagggagccatttgagagggaaaactatgaaatcttgctttttgaaatgattctaaaagcttctatcactgctttgctcttaagagccaaagttgtaggccttttgaaattttaggagagtgagcctataatttcaagataccttaaagagcaaaatttgagccacctcttccaagtgcccttcttactaagtctattcagaatcaagcttaaaaattaccaccagcaaacaatcttcatagcccatataacttttatctatttaattttatagtattgctttataagacagcttagaagaacaataagctatttgtattatgagctgaacaaaaagagaatcataggatagtagcgtctgaggccatcttttctaggaataggaaagagaaaaatgtatttgaattttgcctttagatttgaaattaggttaatagaaataagtaaccccatgtaattcaccttaaaacttaacaaaagaccaaacattacaaaacccagagatatagaatcaatataggatttgaaggcccagcagacagttttctatgacaggttaatctgaagtatcctgtaatgttcattaagttactgtgtttccagaatctaaattagatgagaaatataattgtggttttctaacttgataatcaaattatgttaacatgggtcctttagcttttaaaatgacttgctttgttttagaaaggtggtattaatccactctctattcttgaaaatttggatgggagaattctgaagttgcctgctgttttcctttagcgctgaggttcttaaggttacttttatattactctggaatcaagtattttaaattgtattttttttttaaatgatctctcagcaataattgtttgaaactatccatatataaggttatcagacctacagttccctaagaggaactgcatgttctcttcaatcagaaatatacagtagaagcaggtatatcttccatgcagtttcagtagtaagcactacttatacctacataagagttaaaatccagatgtgggaccttttgataccatcagtgatatatatttttttaaactggtacagagaagtgaaaagattaaattctacttctattttttttttttttttttgagacggagtctcgctctgtcaccaaggccggagtgcagtggtgcgatctcggctcactgcaagctccgcctcccaggttcacgtcattctcctgcctcagcctcccgactagctgggactacaggcgcccaccaccacgcccggctaatttttttgtatttttagtagagacggggtttcaccatgttagccaggatggtctcaatctcctgacctcatgatccgcccgtcttggcctcccaaagtgctgggattacaggcatgagcaactgcgcccagccaaattctacttcttaaaaatcacaaaaactagtttaaattgatgacttgttcgtatgttcaaaatgtaacaacaaaaaaagctaacaccagtcatttatattaactttttttttttaaatcaaaaattgttaatgttagaaacatactatgaagtgcctttatctgcttagacctaaggaagattttaaagttgggttgcacaggaaatgatgatgcttcaatttcttaatagttaaaaagtgctaaatactacttgaaattattgtttacagattagtgacaagagctggggttaggatccggttggactctgacatcggatgccctcaaacatacagaacttccaaactcaagtccagccataagctattttgccaacatgtcagagtaatctgtatttttgtatgtgatttctacttttatagacttgttttaaaacaataaaacacatttttataaaaatgagtgcttaaaaaaaaaaaaaaaaaa

SEQ ID NO: 346 - DNA, 5600 bp, Homo sapiens
aaaaagagaaactgttgggagaggaatcgtatctccatatttcttctttcagccccaatccaagggttgtagctggaactttccatcagttcttcctttctttttcctctctaagcctttgccttgctctgtcacagtgaagtcagccagagcagggctgttaaactctgtgaaatttgtcataagggtgtcaggtatttcttactggcttccaaagaaacatagataaagaaatctttcctgtggcttcccttggcaggctgcattcagaaggtctctcagttgaagaaagagcttggaggacaacagcacaacaggagagtaaaagatgccccagggctgaggcctccgctcaggcagccgcatctggggtcaatcatactcaccttgcccgggccatgctccagcaaaatcaagctgttttcttttgaaagttcaaactcatcaagattatgctgctcactcttatcattctgttgccagtagtttcaaaatttagttttgttagtctctcagcaccgcagcactggagctgtcctgaaggtactctcgcaggaaatgggaattctacttgtgtgggtcctgcacccttcttaattttctcccatggaaatagtatctttaggattgacacagaaggaaccaattatgagcaattggtggtggatgctggtgtctcagtgatcatggattttcattataatgagaaaagaatctattgggtggatttagaaagacaacttttgcaaagagtttttctgaatgggtcaaggcaagagagagtatgtaatatagagaaaaatgtttctggaatggcaataaattggataaatgaagaagttatttggtcaaatcaacaggaaggaatcattacagtaacagatatgaaaggaaataattcccacattcttttaagtgctttaaaatatcctgcaaatgtagcagttgatccagtagaaaggtttatattttggtcttcagaggtggctggaagcctttatagagcagatctcgatggtgtgggagtgaaggctctgttggagacatcagagaaaataacagctgtgtcattggatgtgcttgataagcggctgttttggattcagtacaacagagaaggaagcaattctcttatttgctcctgtgattatgatggaggttctgtccacattagtaaacatccaacacagcataatttgtttgcaatgtccctttttggtgaccgtatcttctattcaacatggaaaatgaagacaatttggatagccaacaaacacactggaaaggacatggttagaattaacctccattcatcatttgtaccacttggtgaactgaaagtagtgcatccacttgcacaacccaaggcagaagatgacacttgggagcctgagcagaaactttgcaaattgaggaaaggaaactgcagcagcactgtgtgtgggcaagacctccagtcacacttgtgcatgtgtgcagagggatacgccctaagtcgagaccggaagtactgtgaagatgttaatgaatgtgctttttggaatcatggctgtactcttgggtgtaaaaacacccctggatcctattactgcacgtgccctgtaggatttgttctgcttcctgatgggaaacgatgtcatcaacttgtttcctgtccacgcaatgtgtctgaatgcagccatgactgtgttctgacatcagaaggtcccttatgtttctgtcctgaaggctcagtgcttgagagagatgggaaaacatgtagcggttgttcctcacccgataatggtggatgtagccagctctgcgttcctcttagcccagtatcctgggaatgtgattgctttcctgggtatgacctacaactggatgaaaaaagctgtgcagcttcaggaccacaaccatttttgctgtttgccaattctcaagatattcgacacatgcattttgatggaacagactatggaactctgctcagccagcagatgggaatggtttatgccctagatcatgaccctgtggaaaataagatatactttgcccatacagccctgaagtggatagagagagctaatatggatggttcccagcgagaaaggcttattgaggaaggagtagatgtgccagaaggtcttgctgtggactggattggccgtagattctattggacagacagagggaaatctctgattggaaggagtgatttaaatgggaaacgttccaaaataatcactaaggagaacatctctcaaccacgaggaattgctgttcatccaatggccaagagattattctggactgatacagggattaatccacgaattgaaagttcttccctccaaggccttggccgtctggttatagccagctctgatctaatctggcccagtggaataacgattgacttcttaactgacaagttgtactggtgcgatgccaagcagtctgtgattgaaatggccaatctggatggttcaaaacgccgaagacttacccagaatgatgtaggtcacccatttgctgtagcagtgtttgaggattatgtgtggttctcagattgggctatgccatcagtaatgagagtaaacaagaggactggcaaagatagagtacgtctccaaggcagcatgctgaagccctcatcactggttgtggttcatccattggcaaaaccaggagcagatccctgcttatatcaaaacggaggctgtgaacatatttgcaaaaagaggcttggaactgcttggtgttcgtgtcgtgaaggttttatgaaagcctcagatgggaaaacgtgtctggctctggatggtcatcagctgttggcaggtggtgaagttgatctaaagaaccaagtaacaccattggacatcttgtccaagactagagtgtcagaagataacattacagaatctcaacacatgctagtggctgaaatcatggtgtcagatcaagatgactgtgctcctgtgggatgcagcatgtatgctcggtgtatttcagagggagaggatgccacatgtcagtgtttgaaaggatttgctggggatggaaaactatgttctgatatagatgaatgtgagatgggtgtcccagtgtgcccccctgcctcctccaagtgcatcaacaccgaaggtggttatgtctgccggtgctcagaaggctaccaaggagatgggattcactgtcttgatattgatgagtgccaactgggggagcacagctgtggagagaatgccagctgcacaaatacagagggaggctatacctgcatgtgtgctggacgcctgtctgaaccaggactgatttgccctgactctactccaccccctcacctcagggaagatgaccaccactattccgtaagaaatagtgactctgaatgtcccctgtcccacgatgggtactgcctccatgatggtgtgtgcatgtatattgaagcattggacaagtatgcatgcaactgtgttgttggctacatcggggagcgatgtcagtaccgagacctgaagtggtgggaactgcgccacgctggccacgggcagcagcagaaggtcatcgtggtggctgtctgcgtggtggtgcttgtcatgctgctcctcctgagcctgtggggggcccactactacaggactcagaagctgctatcgaaaaacccaaagaatccttatgaggagtcgagcagagatgtgaggagtcgcaggcctgctgacactgaggatgggatgtcctcttgccctcaaccttggtttgtggttataaaagaacaccaagacctcaagaatgggggtcaaccagtggctggtgaggatggccaggcagcagatgggtcaatgcaaccaacttcatggaggcaggagccccagttatgtggaatgggcacagagcaaggctgctggattccagtatccagtgataagggctcctgtccccaggtaatggagcgaagctttcatatgccctcctatgggacacagacccttgaagggggtgtcgagaagccccattctctcctatcagctaacccattatggcaacaaagggccctggacccaccacaccaaatggagctgactcagtgaaaactggaattaaaaggaaagtcaagaagaatgaactatgtcgatgcacagtatcttttctttcaaaagtagagcaaaactataggttttggttccacaatctctacgactaatcacctactcaatgcctggagacagatacgtagttgtgcttttgtttgctcttttaagcagtctcactgcagtcttatttccaagtaagagtactgggagaatcactaggtaacttattagaaacccaaattgggacaacagtgctttgtaaattgtgttgtcttcagcagtcaatacaaatagatttttgtttttgttgttcctgcagccccagaagaaattaggggttaaagcagacagtcacactggtttggtcagttacaaagtaatttctttgatctggacagaacatttatatcagtttcatgaaatgattggaatattacaataccgttaagatacagtgtaggcatttaactcctcattggcgtggtccatgctgatgattttgcaaaatgagttgtgatgaatcaatgaaaaatgtaatttagaaactgatttcttcagaattagatggcttattttttaaaatatttgaatgaaaacattttatttttaaaatattacacaggaggcttcggagtttcttagtcattactgtccttttcccctacagaattttccctcttggtgtgattgcacagaatttgtatgtattttcagttacaagattgtaagtaaattgcctgatttgttttcattatagacaacgatgaatttcttctaattatttaaataaaatcaccaaaaacataaacattttattgtatgcctgattaagtagttaattatagtctaaggcagtactagagttgaaccaaaatgatttgtcaagcttgctgatgtttctgtttttcgttttttttttttttccggagagaggataggatctcactctgttatccaggctggagtgtgcaatggcacaatcatagctcagtgcagcctcaaactcctgggctcaagcaatcctcctgcctcagcctcccgagtaactaggaccacaggcacaggccaccatgcctggctaaggtttttatttttattttttgtagacatggggatcacacaatgttgcccaggctggtcttgaactcctggcctcaagcaaggtcgtgctggtaattttgcaaaatgaattgtgattgactttcagcctcccaacgtattagattataggcattagccatggtgcccagccttgtaacttttaaaaaaattttttaatctacaactctgtagattaaaatttcacatggtgttctaattaaatatttttcttgcagccaagatattgttactacagataacacaacctgatatggtaactttaaattttgggggctttgaatcattcagtttatgcattaactagtccctttgtttatctttcatttctcaaccccttgtactttggtgataccagacatcagaataaaaagaaattgaagtaaaaaaaaaaaaaaaaaa

SEQ ID NO: 347 - DNA, 5616 bp, Homo sapiens
ccccggcgcagcgcggccgcagcagcctccgccccccgcacggtgtgagcgcccgacgcggccgaggcggccggagtcccgagctagccccggcggccgccgccgcccagaccggacgacaggccacctcgtcggcgtccgcccgagtccccgcctcgccgccaacgccacaaccaccgcgcacggccccctgactccgtccagtattgatcgggagagccggagcgagctcttcggggagcagcgatgcgaccctccgggacggccggggcagcgctcctggcgctgctggctgcgctctgcccggcgagtcgggctctggaggaaaagaaagtttgccaaggcacgagtaacaagctcacgcagttgggcacttttgaagatcattttctcagcctccagaggatgttcaataactgtgaggtggtccttgggaatttggaaattacctatgtgcagaggaattatgatctttccttcttaaagaccatccaggaggtggctggttatgtcctcattgccctcaacacagtggagcgaattcctttggaaaacctgcagatcatcagaggaaatatgtactacgaaaattcctatgccttagcagtcttatctaactatgatgcaaataaaaccggactgaaggagctgcccatgagaaatttacaggaaatcctgcatggcgccgtgcggttcagcaacaaccctgccctgtgcaacgtggagagcatccagtggcgggacatagtcagcagtgactttctcagcaacatgtcgatggacttccagaaccacctgggcagctgccaaaagtgtgatccaagctgtcccaatgggagctgctggggtgcaggagaggagaactgccagaaactgaccaaaatcatctgtgcccagcagtgctccgggcgctgccgtggcaagtcccccagtgactgctgccacaaccagtgtgctgcaggctgcacaggcccccgggagagcgactgcctggtctgccgcaaattccgagacgaagccacgtgcaaggacacctgccccccactcatgctctacaaccccaccacgtaccagatggatgtgaaccccgagggcaaatacagctttggtgccacctgcgtgaagaagtgtccccgtaattatgtggtgacagatcacggctcgtgcgtccgagcctgtggggccgacagctatgagatggaggaagacggcgtccgcaagtgtaagaagtgcgaagggccttgccgcaaagtgtgtaacggaataggtattggtgaatttaaagactcactctccataaatgctacgaatattaaacacttcaaaaactgcacctccatcagtggcgatctccacatcctgccggtggcatttaggggtgactccttcacacatactcctcctctggatccacaggaactggatattctgaaaaccgtaaaggaaatcacagggtttttgctgattcaggcttggcctgaaaacaggacggacctccatgcctttgagaacctagaaatcatacgcggcaggaccaagcaacatggtcagttttctcttgcagtcgtcagcctgaacataacatccttgggattacgctccctcaaggagataagtgatggagatgtgataatttcaggaaacaaaaatttgtgctatgcaaatacaataaactggaaaaaactgtttgggacctccggtcagaaaaccaaaattataagcaacagaggtgaaaacagctgcaaggccacaggccaggtctgccatgccttgtgctcccccgagggctgctggggcccggagcccagggactgcgtctcttgccggaatgtcagccgaggcagggaatgcgtggacaagtgcaaccttctggagggtgagccaagggagtttgtggagaactctgagtgcatacagtgccacccagagtgcctgcctcaggccatgaacatcacctgcacaggacggggaccagacaactgtatccagtgtgcccactacattgacggcccccactgcgtcaagacctgcccggcaggagtcatgggagaaaacaacaccctggtctggaagtacgcagacgccggccatgtgtgccacctgtgccatccaaactgcacctacggatgcactgggccaggtcttgaaggctgtccaacgaatgggcctaagatcccgtccatcgccactgggatggtgggggccctcctcttgctgctggtggtggccctggggatcggcctcttcatgcgaaggcgccacatcgttcggaagcgcacgctgcggaggctgctgcaggagagggagcttgtggagcctcttacacccagtggagaagctcccaaccaagctctcttgaggatcttgaaggaaactgaattcaaaaagatcaaagtgctgggctccggtgcgttcggcacggtgtataagggactctggatcccagaaggtgagaaagttaaaattcccgtcgctatcaaggaattaagagaagcaacatctccgaaagccaacaaggaaatcctcgatgaagcctacgtgatggccagcgtggacaacccccacgtgtgccgcctgctgggcatctgcctcacctccaccgtgcagctcatcacgcagctcatgcccttcggctgcctcctggactatgtccgggaacacaaagacaatattggctcccagtacctgctcaactggtgtgtgcagatcgcaaagggcatgaactacttggaggaccgtcgcttggtgcaccgcgacctggcagccaggaacgtactggtgaaaacaccgcagcatgtcaagatcacagattttgggctggccaaactgctgggtgcggaagagaaagaataccatgcagaaggaggcaaagtgcctatcaagtggatggcattggaatcaattttacacagaatctatacccaccagagtgatgtctggagctacggggtgaccgtttgggagttgatgacctttggatccaagccatatgacggaatccctgccagcgagatctcctccatcctggagaaaggagaacgcctccctcagccacccatatgtaccatcgatgtctacatgatcatggtcaagtgctggatgatagacgcagatagtcgcccaaagttccgtgagttgatcatcgaattctccaaaatggcccgagacccccagcgctaccttgtcattcagggggatgaaagaatgcatttgccaagtcctacagactccaacttctaccgtgccctgatggatgaagaagacatggacgacgtggtggatgccgacgagtacctcatcccacagcagggcttcttcagcagcccctccacgtcacggactcccctcctgagctctctgagtgcaaccagcaacaattccaccgtggcttgcattgatagaaatgggctgcaaagctgtcccatcaaggaagacagcttcttgcagcgatacagctcagaccccacaggcgccttgactgaggacagcatagacgacaccttcctcccagtgcctgaatacataaaccagtccgttcccaaaaggcccgctggctctgtgcagaatcctgtctatcacaatcagcctctgaaccccgcgcccagcagagacccacactaccaggacccccacagcactgcagtgggcaaccccgagtatctcaacactgtccagcccacctgtgtcaacagcacattcgacagccctgcccactgggcccagaaaggcagccaccaaattagcctggacaaccctgactaccagcaggacttctttcccaaggaagccaagccaaatggcatctttaagggctccacagctgaaaatgcagaatacctaagggtcgcgccacaaagcagtgaatttattggagcatgaccacggaggatagtatgagccctaaaaatccagactctttcgatacccaggaccaagccacagcaggtcctccatcccaacagccatgcccgcattagctcttagacccacagactggttttgcaacgtttacaccgactagccaggaagtacttccacctcgggcacattttgggaagttgcattcctttgtcttcaaactgtgaagcatttacagaaacgcatccagcaagaatattgtccctttgagcagaaatttatctttcaaagaggtatatttgaaaaaaaaaaaaagtatatgtgaggatttttattgattggggatcttggagtttttcattgtcgctattgatttttacttcaatgggctcttccaacaaggaagaagcttgctggtagcacttgctaccctgagttcatccaggcccaactgtgagcaaggagcacaagccacaagtcttccagaggatgcttgattccagtggttctgcttcaaggcttccactgcaaaacactaaagatccaagaaggccttcatggccccagcaggccggatcggtactgtatcaagtcatggcaggtacagtaggataagccactctgtcccttcctgggcaaagaagaaacggaggggatggaattcttccttagacttacttttgtaaaaatgtccccacggtacttactccccactgatggaccagtggtttccagtcatgagcgttagactgacttgtttgtcttccattccattgttttgaaactcagtatgctgcccctgtcttgctgtcatgaaatcagcaagagaggatgacacatcaaataataactcggattccagcccacattggattcatcagcatttggaccaatagcccacagctgagaatgtggaatacctaaggatagcaccgcttttgttctcgcaaaaacgtatctcctaatttgaggctcagatgaaatgcatcaggtcctttggggcatagatcagaagactacaaaaatgaagctgctctgaaatctcctttagccatcaccccaaccccccaaaattagtttgtgttacttatggaagatagttttctccttttacttcacttcaaaagctttttactcaaagagtatatgttccctccaggtcagctgcccccaaaccccctccttacgctttgtcacacaaaaagtgtctctgccttgagtcatctattcaagcacttacagctctggccacaacagggcattttacaggtgcgaatgacagtagcattatgagtagtgtggaattcaggtagtaaatatgaaactagggtttgaaattgataatgctttcacaacatttgcagatgttttagaaggaaaaaagttccttcctaaaataatttctctacaattggaagattggaagattcagctagttaggagcccaccttttttcctaatctgtgtgtgccctgtaacctgactggttaacagcagtcctttgtaaacagtgttttaaactctcctagtcaatatccaccccatccaatttatcaaggaagaaatggttcagaaaatattttcagcctacagttatgttcagtcacacacacatacaaaatgttccttttgcttttaaagtaatttttgactcccagatcagtcagagcccctacagcattgttaagaaagtatttgatttttgtctcaatgaaaataaaactatattcatttccactctaaaaaaaaaaaaaaaaa

SEQ ID NO: 348 - DNA, 8733 bp, Homo sapiens
gctcccggcttagaggacagcggggaaggcgggcggtggggcagggggcctgaagcggcggtaccggtgctggcggcggcagctgaggccttggccgaagccgcgcgaacctcagggcaagatgcttggaaccggacctgccgccgccaccaccgctgccaccacatctagcaatgtgagcgtcctgcagcagtttgccagtggcctaaagagccggaatgaggaaaccagggccaaagccgccaaggagctccagcactatgtcaccatggaactccgagagatgagtcaagaggagtctactcgcttctatgaccaactgaaccatcacatttttgaattggtttccagctcagatgccaatgagaggaaaggtggcatcttggccatagctagcctcataggagtggaaggtgggaatgccacccgaattggcagatttgccaactatcttcggaacctcctcccctccaatgacccagttgtcatggaaatggcatccaaggccattggccgtcttgccatggcaggggacacttttaccgctgagtacgtggaatttgaggtgaagcgagccctggaatggctgggtgctgaccgcaatgagggccggagacatgcagctgtcctggttctccgtgagctggccatcagcgtccctaccttcttcttccagcaagtgcaacccttctttgacaacatttttgtggccgtgtgggaccccaaacaggccatccgtgagggagctgtagccgcccttcgtgcctgtctgattctcacaacccagcgtgagccgaaggagatgcagaagcctcagtggtacaggcacacatttgaagaagcagagaagggatttgatgagaccttggccaaagagaagggcatgaatcgggatgatcggatccatggagccttgttgatccttaacgagctggtccgaatcagcagcatggagggagagcgtctgagagaagaaatggaagaaatcacacagcagcagctggtacacgacaagtactgcaaagatctcatgggcttcggaacaaaacctcgtcacattacccccttcaccagtttccaggctgtacagccccagcagtcaaatgccttggtggggctgctggggtacagctctcaccaaggcctcatgggatttgggacctcccccagtccagctaagtccaccctggtggagagccggtgttgcagagacttgatggaggagaaatttgatcaggtgtgccagtgggtgctgaaatgcaggaatagcaagaactcgctgatccaaatgacaatccttaatttgttgccccgcttggctgcattccgaccttctgccttcacagatacccagtatctccaagataccatgaaccatgtcctaagctgtgtcaagaaggagaaggaacgtacagcggccttccaagccctggggctactttctgtggctgtgaggtctgagtttaaggtctatttgcctcgcgtgctggacatcatccgagcggccctgcccccaaaggacttcgcccataagaggcagaaggcaatgcaggtggatgccacagtcttcacttgcatcagcatgctggctcgagcaatggggccaggcatccagcaggatatcaaggagctgctggagcccatgctggcagtgggactaagccctgccctcactgcagtgctctacgacctgagccgtcagattccacagctaaagaaggacattcaagatgggctactgaaaatgctgtccctggtccttatgcacaaaccccttcgccacccaggcatgcccaagggcctggcccatcagctggcctctcctggcctcacgaccctccctgaggccagcgatgtgggcagcatcactcttgccctccgaacgcttggcagctttgaatttgaaggccactctctgacccaatttgttcgccactgtgcggatcatttcctgaacagtgagcacaaggagatccgcatggaggctgcccgcacctgctcccgcctgctcacaccctccatccacctcatcagtggccatgctcatgtggttagccagaccgcagtgcaagtggtggcagatgtgcttagcaaactgctcgtagttgggataacagatcctgaccctgacattcgctactgtgtcttggcgtccctggacgagcgctttgatgcacacctggcccaggcggagaacttgcaggccttgtttgtggctctgaatgaccaggtgtttgagatccgggagctggccatctgcactgtgggccgactcagtagcatgaaccctgcctttgtcatgcctttcctgcgcaagatgctcatccagattttgacagagttggagcacagtgggattggaagaatcaaagagcagagtgcccgcatgctggggcacctggtctccaatgccccccgactcatccgcccctacatggagcctattctgaaggcattaattttgaaactgaaagatccagaccctgatccaaacccaggtgtgatcaataatgtcctggcaacaataggagaattggcacaggttagtggcctggaaatgaggaaatgggttgatgaactttttattatcatcatggacatgctccaggattcctctttgttggccaaaaggcaggtggctctgtggaccctgggacagttggtggccagcactggctatgtagtagagccctacaggaagtaccctactttgcttgaggtgctactgaattttctgaagactgagcagaaccagggtacacgcagagaggccatccgtgtgttagggcttttaggggctttggatccttacaagcacaaagtgaacattggcatgatagaccagtcccgggatgcctctgctgtcagcctgtcagaatccaagtcaagtcaggattcctctgactatagcactagtgaaatgctggtcaacatgggaaacttgcctctggatgagttctacccagctgtgtccatggtggccctgatgcggatcttccgagaccagtcactctctcatcatcacaccatggttgtccaggccatcaccttcatcttcaagtccctgggactcaaatgtgtgcagttcctgccccaggtcatgcccacgttccttaacgtcattcgagtctgtgatggggccatccgggaatttttgttccagcagctgggaatgttggtgtcctttgtgaagagccacatcagaccttatatggatgaaatagtcaccctcatgagagaattctgggtcatgaacacctcaattcagagcacgatcattcttctcattgagcaaattgtggtagctcttgggggtgaatttaagctctacctgccccagctgatcccacacatgctgcgtgtcttcatgcatgacaacagcccaggccgcattgtctctatcaagttactggctgcaatccagctgtttggcgccaacctggatgactacctgcatttactgctgcctcctattgttaagttgtttgatgcccctgaagctccactgccatctcgaaaggcagcgctagagactgtggaccgcctgacggagtccctggatttcactgactatgcctcccggatcattcaccctattgttcgaacactggaccagagcccagaactgcgctccacagccatggacacgctgtcttcacttgtttttcagctggggaagaagtaccaaattttcattccaatggtgaataaagttctggtgcgacaccgaatcaatcatcagcgctatgatgtgctcatctgcagaattgtcaagggatacacacttgctgatgaagaggaggatcctttgatttaccagcatcggatgcttaggagtggccaaggggatgcattggctagtggaccagtggaaacaggacccatgaagaaactgcacgtcagcaccatcaacctccaaaaggcctggggcgctgccaggagggtctccaaagatgactggctggaatggctgagacggctgagcctggagctgctgaaggactcatcatcgccctccctgcgctcctgctgggccctggcacaggcctacaacccgatggccagggatctcttcaatgctgcatttgtgtcctgctggtctgaactgaatgaagatcaacaggatgagctcatcagaagcatcgagttggccctcacctcacaagacatcgctgaagtcacacagaccctcttaaacttggctgaattcatggaacacagtgacaagggccccctgccactgagagatgacaatggcattgttctgctgggtgagagagctgccaagtgccgagcatatgccaaagcactacactacaaagaactggagttccagaaaggccccacccctgccattctagaatctctcatcagcattaataataagctacagcagccggaggcagcggccggagtgttagaatatgccatgaaacactttggagagctggagatccaggctacctggtatgagaaactgcacgagtgggaggatgcccttgtggcctatgacaagaaaatggacaccaacaaggacgacccagagctgatgctgggccgcatgcgctgcctcgaggccttgggggaatggggtcaactccaccagcagtgctgtgaaaagtggaccctggttaatgatgagacccaagccaagatggcccggatggctgctgcagctgcatggggtttaggtcagtgggacagcatggaagaatacacctgtatgatccctcgggacacccatgatggggcattttatagagctgtgctggcactgcatcaggacctcttctccttggcacaacagtgcattgacaaggccagggacctgctggatgctgaattaactgcgatggcaggagagagttacagtcgggcatatggggccatggtttcttgccacatgctgtccgagctggaggaggttatccagtacaaacttgtccccgagcgacgagagatcatccgccagatctggtgggagagactgcagggctgccagcgtatcgtagaggactggcagaaaatccttatggtgcggtcccttgtggtcagccctcatgaagacatgagaacctggctcaagtatgcaagcctgtgcggcaagagtggcaggctggctcttgctcataaaactttagtgttgctcctgggagttgatccgtctcggcaacttgaccatcctctgccaacagttcaccctcaggtgacctatgcctacatgaaaaacatgtggaagagtgcccgcaagatcgatgccttccagcacatgcagcattttgtccagaccatgcagcaacaggcccagcatgccatcgctactgaggaccagcagcataagcaggaactgcacaagctcatggcccgatgcttcctgaaacttggagagtggcagctgaatctacagggcatcaatgagagcacaatccccaaagtgctgcagtactacagcgccgccacagagcacgaccgcagctggtacaaggcctggcatgcgtgggcagtgatgaacttcgaagctgtgctacactacaaacatcagaaccaagcccgcgatgagaagaagaaactgcgtcatgccagcggggccaacatcaccaacgccaccactgccgccaccacggccgccactgccaccaccactgccagcaccgagggcagcaacagtgagagcgaggccgagagcaccgagaacagccccaccccatcgccgctgcagaagaaggtcactgaggatctgtccaaaaccctcctgatgtacacggtgcctgccgtccagggcttcttccgttccatctccttgtcacgaggcaacaacctccaggatacactcagagttctcaccttatggtttgattatggtcactggccagatgtcaatgaggccttagtggagggggtgaaagccatccagattgatacctggctacaggttatacctcagctcattgcaagaattgatacgcccagacccttggtgggacgtctcattcaccagcttctcacagacattggtcggtaccacccccaggccctcatctacccactgacagtggcttctaagtctaccacgacagcccggcacaatgcagccaacaagattctgaagaacatgtgtgagcacagcaacaccctggtccagcaggccatgatggtgagcgaggagctgatccgagtggccatcctctggcatgagatgtggcatgaaggcctggaagaggcatctcgtttgtactttggggaaaggaacgtgaaaggcatgtttgaggtgctggagcccttgcatgctatgatggaacggggcccccagactctgaaggaaacatcctttaatcaggcctatggtcgagatttaatggaggcccaagagtggtgcaggaagtacatgaaatcagggaatgtcaaggacctcacccaagcctgggacctctattatcatgtgttccgacgaatctcaaagcagctgcctcagctcacatccttagagctgcaatatgtttccccaaaacttctgatgtgccgggaccttgaattggctgtgccaggaacatatgaccccaaccagccaatcattcgcattcagtccatagcaccgtctttgcaagtcatcacatccaagcagaggccccggaaattgacacttatgggcagcaacggacatgagtttgttttccttctaaaaggccatgaagatctgcgccaggatgagcgtgtgatgcagctcttcggcctggttaacacccttctggccaatgacccaacatctcttcggaaaaacctcagcatccagagatacgctgtcatccctttatcgaccaactcgggcctcattggctgggttccccactgtgacacactgcacgccctcatccgggactacagggagaagaagaagatccttctcaacatcgagcatcgcatcatgttgcggatggctccggactatgaccacttgactctgatgcagaaggtggaggtgtttgagcatgccgtcaataatacagctggggacgacctggccaagctgctgtggctgaaaagccccagctccgaggtgtggtttgaccgaagaaccaattatacccgttctttagcggtcatgtcaatggttgggtatattttaggcctgggagatagacacccatccaacctgatgctggaccgtctgagtgggaagatcctgcacattgactttggggactgctttgaggttgctatgacccgagagaagtttccagagaagattccatttagactaacaagaatgttgaccaatgctatggaggttacaggcctggatggcaactacagaatcacatgccacacagtgatggaggtgctgcgagagcacaaggacagtgtcatggccgtgctggaagcctttgtctatgaccccttgctgaactggaggctgatggacacaaataccaaaggcaacaagcgatcccgaacgaggacggattcctactctgctggccagtcagtcgaaattttggacggtgtggaacttggagagccagcccataagaaaacggggaccacagtgccagaatctattcattctttcattggagacggtttggtgaaaccagaggccctaaataagaaagctatccagattattaacagggttcgagataagctcactggtcgggacttctctcatgatgacactttggatgttccaacgcaagttgagctgctcatcaaacaagcgacatcccatgaaaacctctgccagtgctatattggctggtgccctttctggtaactggaggcccagatgtgcccatcacgttttttctgaggcttttgtactttagtaaatgcttccactaaactgaaaccatggtgagaaagtttgactttgttaaatattttgaaatgtaaatgaaaagaactactgtatattaaaagttggtttgaaccaactttctagctgctgttgaagaatatattgtcagaaacacaaggcttgatttggttcccaggacagtgaaacatagtaataccacgtaaatcaagccattcattttggggaacagaagatccataactttagaaatacgggttttgacttaactcacaagagaactcatcataagtacttgctgatggaagaatgacctagttgctcctctcaacatgggtacagcaaactcagcacagccaagaagcctcaggtcgtggagaacatggattaggatcctagactgtaaagacacagaagatgctgacctcacccctgccacctatcccaagacctcactggtctgtggacagcagcagaaatgtttgcaagataggccaaaatgagtacaaaaggtctgtcttccatcagacccagtgatgctgcgactcacacgcttcaattcaagacctgaccgctagtagggaggtttattcagatcgctggcagcctcggctgagcagatgcacagaggggatcactgtgcagtgggaccaccctcactggccttctgcagcagggttctgggatgttttcagtggtcaaaatactctgtttagagcaagggctcagaaaacagaaatactgtcatggaggtgctgaacacagggaaggtctggtacatattggaaattatgagcagaacaaatactcaactaaatgcacaaagtataaagtgtagccatgtctagacaccatgttgtatcagaataatttttgtgccaataaatgacatcagaattttaaacatatgtaaaaaaaaa

SEQ ID NO: 349 - DNA, 5572 bp, Homo sapiens
cctcccctcgcccggcgcggtcccgtccgcctctcgctcgcctcccgcctcccctcggtcttccgaggcgcccgggctcccggcgcggcggcggagggggcgggcaggccggcgggcggtgatgtggcgggactctttatgcgctgcggcaggatacgcgctcggcgctgggacgcgactgcgctcagttctctcctctcggaagctgcagccatgatggaagtttgagagttgagccgctgtgaggcgaggccgggctcaggcgagggagatgagagacggcggcggccgcggcccggagcccctctcagcgcctgtgagcagccgcgggggcagcgccctcggggagccggccggcctgcggcggcggcagcggcggcgtttctcgcctcctcttcgtcttttctaaccgtgcagcctcttcctcggcttctcctgaaagggaaggtggaagccgtgggctcgggcgggagccggctgaggcgcggcggcggcggcggcacctcccgctcctggagcgggggggagaagcggcggcggcggcggccgcggcggctgcagctccagggagggggtctgagtcgcctgtcaccatttccagggctgggaacgccggagagttggtctctccccttctactgcctccaacacggcggcggcggcggcggcacatccagggacccgggccggttttaaacctcccgtccgccgccgccgcaccccccgtggcccgggctccggaggccgccggcggaggcagccgttcggaggattattcgtcttctccccattccgctgccgccgctgccaggcctctggctgctgaggagaagcaggcccagtcgctgcaaccatccagcagccgccgcagcagccattacccggctgcggtccagagccaagcggcggcagagcgaggggcatcagctaccgccaagtccagagccatttccatcctgcagaagaagccccgccaccagcagcttctgccatctctctcctcctttttcttcagccacaggctcccagacatgacagccatcatcaaagagatcgttagcagaaacaaaaggagatatcaagaggatggattcgacttagacttgacctatatttatccaaacattattgctatgggatttcctgcagaaagacttgaaggcgtatacaggaacaatattgatgatgtagtaaggtttttggattcaaagcataaaaaccattacaagatatacaatctttgtgctgaaagacattatgacaccgccaaatttaattgcagagttgcacaatatccttttgaagaccataacccaccacagctagaacttatcaaacccttttgtgaagatcttgaccaatggctaagtgaagatgacaatcatgttgcagcaattcactgtaaagctggaaagggacgaactggtgtaatgatatgtgcatatttattacatcggggcaaatttttaaaggcacaagaggccctagatttctatggggaagtaaggaccagagacaaaaagggagtaactattcccagtcagaggcgctatgtgtattattatagctacctgttaaagaatcatctggattatagaccagtggcactgttgtttcacaagatgatgtttgaaactattccaatgttcagtggcggaacttgcaatcctcagtttgtggtctgccagctaaaggtgaagatatattcctccaattcaggacccacacgacgggaagacaagttcatgtactttgagttccctcagccgttacctgtgtgtggtgatatcaaagtagagttcttccacaaacagaacaagatgctaaaaaaggacaaaatgtttcacttttgggtaaatacattcttcataccaggaccagaggaaacctcagaaaaagtagaaaatggaagtctatgtgatcaagaaatcgatagcatttgcagtatagagcgtgcagataatgacaaggaatatctagtacttactttaacaaaaaatgatcttgacaaagcaaataaagacaaagccaaccgatacttttctccaaattttaaggtgaagctgtacttcacaaaaacagtagaggagccgtcaaatccagaggctagcagttcaacttctgtaacaccagatgttagtgacaatgaacctgatcattatagatattctgacaccactgactctgatccagagaatgaaccttttgatgaagatcagcatacacaaattacaaaagtctgaatttttttttatcaagagggataaaacaccatgaaaataaacttgaataaactgaaaatggacctttttttttttaatggcaataggacattgtgtcagattaccagttataggaacaattctcttttcctgaccaatcttgttttaccctatacatccacagggttttgacacttgttgtccagttgaaaaaaggttgtgtagctgtgtcatgtatatacctttttgtgtcaaaaggacatttaaaattcaattaggattaataaagatggcactttcccgttttattccagttttataaaaagtggagacagactgatgtgtatacgtaggaattttttccttttgtgttctgtcaccaactgaagtggctaaagagctttgtgatatactggttcacatcctacccctttgcacttgtggcaacagataagtttgcagttggctaagagaggtttccgaagggttttgctacattctaatgcatgtattcgggttaggggaatggagggaatgctcagaaaggaaataattttatgctggactctggaccatataccatctccagctatttacacacacctttctttagcatgctacagttattaatctggacattcgaggaattggccgctgtcactgcttgttgtttgcgcatttttttttaaagcatattggtgctagaaaaggcagctaaaggaagtgaatctgtattggggtacaggaatgaaccttctgcaacatcttaagatccacaaatgaagggatataaaaataatgtcataggtaagaaacacagcaacaatgacttaaccatataaatgtggaggctatcaacaaagaatgggcttgaaacattataaaaattgacaatgatttattaaatatgttttctcaattgtaacgacttctccatctcctgtgtaatcaaggccagtgctaaaattcagatgctgttagtacctacatcagtcaacaacttacacttattttactagttttcaatcataatacctgctgtggatgcttcatgtgctgcctgcaagcttcttttttctcattaaatataaaatattttgtaatgctgcacagaaattttcaatttgagattctacagtaagcgttttttttctttgaagatttatgatgcacttattcaatagctgtcagccgttccacccttttgaccttacacattctattacaatgaattttgcagttttgcacattttttaaatgtcattaactgttagggaattttacttgaatactgaatacatataatgtttatattaaaaaggacatttgtgttaaaaaggaaattagagttgcagtaaactttcaatgctgcacacaaaaaaaagacatttgatttttcagtagaaattgtcctacatgtgctttattgatttgctattgaaagaatagggtttttttttttttttttttttttttttttaaatgtgcagtgttgaatcatttcttcatagtgctcccccgagttgggactagggcttcaatttcacttcttaaaaaaaatcatcatatatttgatatgcccagactgcatacgattttaagcggagtacaactactattgtaaagctaatgtgaagatattattaaaaaggtttttttttccagaaatttggtgtcttcaaattataccttcaccttgacatttgaatatccagccattttgtttcttaatggtataaaattccattttcaataacttattggtgctgaaattgttcactagctgtggtctgacctagttaatttacaaatacagattgaataggacctactagagcagcatttatagagtttgatggcaaatagattaggcagaacttcatctaaaatattcttagtaaataatgttgacacgttttccataccttgtcagtttcattcaacaatttttaaatttttaacaaagctcttaggatttacacatttatatttaaacattgatatatagagtattgattgattgctcataagttaaattggtaaagttagagacaactattctaacacctcaccattgaaatttatatgccaccttgtctttcataaaagctgaaaattgttacctaaaatgaaaatcaacttcatgttttgaagatagttataaatattgttctttgttacaatttcgggcaccgcatattaaaacgtaactttattgttccaatatgtaacatggagggccaggtcataaataatgacattataatgggcttttgcactgttattatttttcctttggaatgtgaaggtctgaatgagggttttgattttgaatgtttcaatgtttttgagaagccttgcttacattttatggtgtagtcattggaaatggaaaaatggcattatatatattatatatataaatatatattatacatactctccttactttatttcagttaccatccccatagaatttgacaagaattgctatgactgaaaggttttcgagtcctaattaaaactttatttatggcagtattcataattagcctgaaatgcattctgtaggtaatctctgagtttctggaatattttcttagactttttggatgtgcagcagcttacatgtctgaagttacttgaaggcatcacttttaagaaagcttacagttgggccctgtaccatcccaagtcctttgtagctcctcttgaacatgtttgccatacttttaaaagggtagttgaataaatagcatcaccattctttgctgtggcacaggttataaacttaagtggagtttaccggcagcatcaaatgtttcagctttaaaaaataaaagtagggtacaagtttaatgtttagttctagaaattttgtgcaatatgttcataacgatggctgtggttgccacaaagtgcctcgtttacctttaaatactgttaatgtgtcatgcatgcagatggaaggggtggaactgtgcactaaagtgggggctttaactgtagtatttggcagagttgccttctacctgccagttcaaaagttcaacctgttttcatatagaatatatatactaaaaaatttcagtctgttaaacagccttactctgattcagcctcttcagatactcttgtgctgtgcagcagtggctctgtgtgtaaatgctatgcactgaggatacacaaaaataccaatatgatgtgtacaggataatgcctcatcccaatcagatgtccatttgttattgtgtttgttaacaaccctttatctcttagtgttataaactccacttaaaactgattaaagtctcattcttgtcaaaaaaaaaaaaaaaaaaaaaaaaaaa

SEQ ID NO: 350 - DNA, 2591 bp, Homo sapiens
gatgggattggggttttcccctcccatgtgctcaagactggcgctaaaagttttgagcttctcaaaagtctagagccaccgtccagggagcaggtagctgctgggctccggggacactttgcgttcgggctgggagcgtgctttccacgacggtgacacgcttccctggattggcagccagactgccttccgggtcactgccatggaggagccgcagtcagatcctagcgtcgagccccctctgagtcaggaaacattttcagacctatggaaactacttcctgaaaacaacgttctgtcccccttgccgtcccaagcaatggatgatttgatgctgtccccggacgatattgaacaatggttcactgaagacccaggtccagatgaagctcccagaatgccagaggctgctccccccgtggcccctgcaccagcagctcctacaccggcggcccctgcaccagccccctcctggcccctgtcatcttctgtcccttcccagaaaacctaccagggcagctacggtttccgtctgggcttcttgcattctgggacagccaagtctgtgacttgcacgtactcccctgccctcaacaagatgttttgccaactggccaagacctgccctgtgcagctgtgggttgattccacacccccgcccggcacccgcgtccgcgccatggccatctacaagcagtcacagcacatgacggaggttgtgaggcgctgcccccaccatgagcgctgctcagatagcgatggtctggcccctcctcagcatcttatccgagtggaaggaaatttgcgtgtggagtatttggatgacagaaacacttttcgacatagtgtggtggtgccctatgagccgcctgaggttggctctgactgtaccaccatccactacaactacatgtgtaacagttcctgcatgggcggcatgaaccggaggcccatcctcaccatcatcacactggaagactccagtggtaatctactgggacggaacagctttgaggtgcgtgtttgtgcctgtcctgggagagaccggcgcacagaggaagagaatctccgcaagaaaggggagcctcaccacgagctgcccccagggagcactaagcgagcactgcccaacaacaccagctcctctccccagccaaagaagaaaccactggatggagaatatttcacccttcagatccgtgggcgtgagcgcttcgagatgttccgagagctgaatgaggccttggaactcaaggatgcccaggctgggaaggagccaggggggagcagggctcactccagccacctgaagtccaaaaagggtcagtctacctcccgccataaaaaactcatgttcaagacagaagggcctgactcagactgacattctccacttcttgttccccactgacagcctcccacccccatctctccctcccctgccattttgggttttgggtctttgaacccttgcttgcaataggtgtgcgtcagaagcacccaggacttccatttgctttgtcccggggctccactgaacaagttggcctgcactggtgttttgttgtggggaggaggatggggagtaggacataccagcttagattttaaggtttttactgtgagggatgtttgggagatgtaagaaatgttcttgcagttaagggttagtttacaatcagccacattctaggtaggggcccacttcaccgtactaaccagggaagctgtccctcactgttgaattttctctaacttcaaggcccatatctgtgaaatgctggcatttgcacctacctcacagagtgcattgtgagggttaatgaaataatgtacatctggccttgaaaccaccttttattacatggggtctagaacttgacccccttgagggtgcttgttccctctccctgttggtcggtgggttggtagtttctacagttgggcagctggttaggtagagggagttgtcaagtctctgctggcccagccaaaccctgtctgacaacctcttggtgaaccttagtacctaaaaggaaatctcaccccatcccacaccctggaggatttcatctcttgtatatgatgatctggatccaccaagacttgttttatgctcagggtcaatttcttttttcttttttttttttttttttctttttctttgagactgggtctcgctttgttgcccaggctggagtggagtggcgtgatcttggcttactgcagcctttgcctccccggctcgagcagtcctgcctcagcctccggagtagctgggaccacaggttcatgccaccatggccagccaacttttgcatgttttgtagagatggggtctcacagtgttgcccaggctggtctcaaactcctgggctcaggcgatccacctgtctcagcctcccagagtgctgggattacaattgtgagccaccacgtccagctggaagggtcaacatcttttacattctgcaagcacatctgcattttcaccccacccttcccctccttctccctttttatatcccatttttatatcgatctcttattttacaataaaactttgctgccacctgtgtgtctgaggggtg

SEQ ID NO: 351 - DNA, 2285 bp, Homo sapiens
cccggggccgcacccacagccccggctaccccggagaagcctgacttgagaaccctttctgcagagtcccggcagtgcgggactccggtagccgcccctccggtagccgcccctcctgcccccgcgccgccgccctatatgttgcccgccgcggcctctggggcatggagcacgctgcccagccctggcgatggcaacggcgacgggggtggcggaggagcgcctgctggccgcgctcgcctacctgcagtgcgccgtgggctgcgcggtcttcgcgcgcaatcgtcagacgaactcagtgtacggccgccacgcgctgcccagccacaggctccgagtgccggcgcgggccgcctgggtggtgcaggagctgccctcgctggccctgccgctctaccagtacgccagcgagtccgccccgcgtctccgcagcgcgcccaactgcatcctcctggccatgttcctcgtccactacgggcatcggtgcttaatttacccatttctgatgcgaggaggaaagcctatgccactgttggcgtgtacaatggcgattatgttctgtacctgtaacggctatttgcaaagcagatacttgagccattgtgcagtgtatgctgatgactgggtaacagatccccgttttctaataggttttggcttgtggttaacgggcatgttgataaacatccattcagatcatatcctaaggaatctcagaaaaccaggagatactggatacaaaataccaaggggaggcttatttgaatacgtaactgcagccaactattttggagaaatcatggagtggtgtggctatgccctggccagctggtctgtccaaggcgcggcttttgctttcttcacgttttgttttttatctggtagagcaaaagagcatcatgagtggtacctccggaaatttgaagagtatccaaagttcagaaaaattataattccatttttgttttaagtgcgtttttcatgaaattatcttcaacttgaagctttccaatggcgcttctctatggactttgtaaataagttatatctttgtaattttcctgctactttatcattttcaagatgtcctctaggaattttttttctagtaattttgcaatctacctaataagtacctaaatacgctgaaatggaggttgaatatcctactgtgtaacaggtcagaatttcaagctctgggtaataactgctgatattttttctaatttcaaatttacctcttttggctatgtcttgccaagtgtgtatgagactagactttacaactgtctttgatggcattttcagaacaataaatgtcacaatcccttctatagccccctacagtgatctcttcaaggtcaactgcagtgttgcttccctccccctatagggctggaatctgtctaggagccctctctcggaggccacagaggctgggggtagccattgtgcagtcatggcccgggggaaacttgccaaccttcgtgtcaggtgctgtgtgtaagtggagaacttggggatagaggaggaagctcctcgtggcccttccaaggtgaggcaaaggcatctggacttgttccagcccagcccaccgggtgacatcaccgggcagggaggggtgctggtggtggttcatacggagtaagctgctctgcctgtgtgagtggctcctgggccctaaacaggcacctttaggccatgggtcactcaccgtgagccatcaatgtgctctggtctgacatggtttctctctgtcttctagtctagacctagtttttttgttctgttccccacgtatggatatagtagagattgttgtctgtgaaatttctcttttgtagattttgagttttcccttgtagtgtaaagaatgatcactttctgtaacaataacaagaccactttttaagatttatcctgtttgttctttgttgattgaaacataataattgttaaaattctctacagccttctttttcttccatagctaatcttccttctaatagtttttgctttctgttttgctgttgttgctttgcaaagctttcccctcatagcctgtacctgttatcaatataaaataatcttcctgttgaatgcttcatgacttgaattctactttgataaaaacattgccatactgctttttatcttgatgaattcatctggcattgctttgccttatcatctcatctggagtttttaaatgccatttgtttcagttgtctttaacaacataataaatagactttgccatttaaaaaaaaaaaaaaaaaaaaaaa

SEQ ID NO: 352 - DNA, 18 bp, Artificial Sequence
  Description of Artificial Sequence: Synthetic primer
gcttctgccggttagctg

SEQ ID NO: 353 - DNA, 20 bp, Artificial Sequence
  Description of Artificial Sequence: Synthetic primer
tgcttcccacagactcaatt

SEQ ID NO: 354 - DNA, 18 bp, Artificial Sequence
  Description of Artificial Sequence: Synthetic primer
aagcggtcggatgtgctg

SEQ ID NO: 355 - DNA, 18 bp, Artificial Sequence
  Description of Artificial Sequence: Synthetic primer
atccactcagcctggcat

SEQ ID NO: 356 - DNA, 20 bp, Artificial Sequence
  Description of Artificial Sequence: Synthetic primer
tgctcaaccatctccttcca

SEQ ID NO: 357 - DNA, 18 bp, Artificial Sequence
  Description of Artificial Sequence: Synthetic primer
ctggatttgcaaggcggc

SEQ ID NO: 358 - DNA, 20 bp, Artificial Sequence
  Description of Artificial Sequence: Synthetic primer
gaacgagcgcagagttatcg

SEQ ID NO: 359 - DNA, 20 bp, Artificial Sequence
  Description of Artificial Sequence: Synthetic primer
gatgttgacgtctggaaggc

SEQ ID NO: 360 - DNA, 20 bp, Artificial Sequence
  Description of Artificial Sequence: Synthetic primer
cagcgactcggtagtccatt

SEQ ID NO: 361 - DNA, 20 bp, Artificial Sequence
  Description of Artificial Sequence: Synthetic primer
ggaaggagccggagtaagag

SEQ ID NO: 362 - DNA, 22 bp, Artificial Sequence
  Description of Artificial Sequence: Synthetic primer
tgagaatgccaaagtaaccaga

SEQ ID NO: 363 - DNA, 21 bp, Artificial Sequence
  Description of Artificial Sequence: Synthetic primer
tgaagtttcagcatccacgta

SEQ ID NO: 364 - DNA, 21 bp, Artificial Sequence
  Description of Artificial Sequence: Synthetic primer
tcgaaatgcacagttagcaca

SEQ ID NO: 365 - DNA, 20 bp, Artificial Sequence
  Description of Artificial Sequence: Synthetic primer
cccgtggaccttattgtctc

SEQ ID NO: 366 - DNA, 19 bp, Artificial Sequence
  Description of Artificial Sequence: Synthetic primer
tcacagtgcagctcaagca

SEQ ID NO: 367 - DNA, 23 bp, Artificial Sequence
  Description of Artificial Sequence: Synthetic primer
tgtgatgtagtccaccagtctgt

SEQ ID NO: 368 - DNA, 20 bp, Artificial Sequence
  Description of Artificial Sequence: Synthetic primer
atttgccagccaggctagtg

SEQ ID NO: 369 - DNA, 18 bp, Artificial Sequence
  Description of Artificial Sequence: Synthetic primer
gccaatttggtggcctct

SEQ ID NO: 370 - DNA, 25 bp, Artificial Sequence
  Description of Artificial Sequence: Synthetic primer
gaaattatcgatatgttgtcatgga

SEQ ID NO: 371 - DNA, 20 bp, Artificial Sequence
  Description of Artificial Sequence: Synthetic primer
ggccttctgctagatgtcgt

SEQ ID NO: 372 - DNA, 20 bp, Artificial Sequence
  Description of Artificial Sequence: Synthetic primer
cagagtctaggctgggttca

SEQ ID NO: 373 - DNA, 22 bp, Artificial Sequence
  Description of Artificial Sequence: Synthetic primer
aaaagatttgacgatccccaga

SEQ ID NO: 374 - DNA, 20 bp, Artificial Sequence
  Description of Artificial Sequence: Synthetic primer
ccaagagagccatccagact

SEQ ID NO: 375 - DNA, 21 bp, Artificial Sequence
  Description of Artificial Sequence: Synthetic primer
gggatttccatttctctttcg

SEQ ID NO: 376 - DNA, 20 bp, Artificial Sequence
  Description of Artificial Sequence: Synthetic primer
gcacgacgtcttccagtacc

SEQ ID NO: 377 - DNA, 20 bp, Artificial Sequence
  Description of Artificial Sequence: Synthetic primer
gtagcccacttggtccacct

SEQ ID NO: 378 - DNA, 18 bp, Artificial Sequence
  Description of Artificial Sequence: Synthetic primer
ctctctccgtggcagcag

SEQ ID NO: 379 - DNA, 20 bp, Artificial Sequence
  Description of Artificial Sequence: Synthetic primer
atgactccaactgcagagca

SEQ ID NO: 380 - DNA, 21 bp, Artificial Sequence
  Description of Artificial Sequence: Synthetic primer
ggcaaagtatgagaaggctga

SEQ ID NO: 381 - DNA, 22 bp, Artificial Sequence
  Description of Artificial Sequence: Synthetic primer
tgtccatttgctatttcccttc

SEQ ID NO: 382 - DNA, 19 bp, Artificial Sequence
  Description of Artificial Sequence: Synthetic primer
agcctggaagtgttgcaga

SEQ ID NO: 383 - DNA, 20 bp, Artificial Sequence
  Description of Artificial Sequence: Synthetic primer
tagttgatggcctccaggtt

SEQ ID NO: 384 - DNA, 20 bp, Artificial Sequence
  Description of Artificial Sequence: Synthetic primer
atttgctaaccaggccagtg

SEQ ID NO: 385 - DNA, 18 bp, Artificial Sequence
  Description of Artificial Sequence: Synthetic primer
gccaatttgacggcctct

SEQ ID NO: 386 - DNA, 20 bp, Artificial Sequence
  Description of Artificial Sequence: Synthetic primer
tcctgtcctggaagcagtgt

SEQ ID NO: 387 - DNA, 20 bp, Artificial Sequence
  Description of Artificial Sequence: Synthetic primer
ttggcaggagtcaggactgt

SEQ ID NO: 388 - DNA, 24 bp, Artificial Sequence
  Description of Artificial Sequence: Synthetic primer
ggaggatctggtgtttatcttctg

SEQ ID NO: 389 - DNA, 19 bp, Artificial Sequence
  Description of Artificial Sequence: Synthetic primer
tgcaattcatgcttgatcc

SEQ ID NO: 390 - DNA, 18 bp, Artificial Sequence
  Description of Artificial Sequence: Synthetic primer
gtggcagctccaaagcat

SEQ ID NO: 391 - DNA, 20 bp, Artificial Sequence
  Description of Artificial Sequence: Synthetic primer
tgatgagggggagacactct

SEQ ID NO: 392 - DNA, 21 bp, Artificial Sequence
  Description of Artificial Sequence: Synthetic primer
caggttttcttcaggcagagg

SEQ ID NO: 393 - DNA, 21 bp, Artificial Sequence
  Description of Artificial Sequence: Synthetic primer
tggatttcttcgaaggttggc

SEQ ID NO: 394 - DNA, 20 bp, Artificial Sequence
  Description of Artificial Sequence: Synthetic primer
cccctgaagatcaagatggc

SEQ ID NO: 395 - DNA, 19 bp, Artificial Sequence
  Description of Artificial Sequence: Synthetic primer
ctgcgtgtccttccaagtg

SEQ ID NO: 396 - DNA, 20 bp, Artificial Sequence
  Description of Artificial Sequence: Synthetic primer
cgcatgtgtcagagaccatc

SEQ ID NO: 397 - DNA, 20 bp, Artificial Sequence
  Description of Artificial Sequence: Synthetic primer
tggacaagattggggcatct

SEQ ID NO: 398 - DNA, 21 bp, Artificial Sequence
  Description of Artificial Sequence: Synthetic primer
gagcagagatgtgaggagtcg

SEQ ID NO: 399 - DNA, 20 bp, Artificial Sequence
  Description of Artificial Sequence: Synthetic primer
cccattcttgaggtcttggt

SEQ ID NO: 400 - DNA, 20 bp, Artificial Sequence
  Description of Artificial Sequence: Synthetic primer
cttgcagcgatacagctcag

SEQ ID NO: 401 - DNA, 20 bp, Artificial Sequence
  Description of Artificial Sequence: Synthetic primer
tttgggaacggactggttta

SEQ ID NO: 402 - DNA, 20 bp, Artificial Sequence
  Description of Artificial Sequence: Synthetic primer
gatgttccaacgcaagttga

SEQ ID NO: 403 - DNA, 20 bp, Artificial Sequence
  Description of Artificial Sequence: Synthetic primer
acatctgggcctccagttac

SEQ ID NO: 404 - DNA, 22 bp, Artificial Sequence
  Description of Artificial Sequence: Synthetic primer
gcaaataaagacaaagccaacc

SEQ ID NO: 405 - DNA, 20 bp, Artificial Sequence
  Description of Artificial Sequence: Synthetic primer
ttgaactgctagcctctgga

SEQ ID NO: 406 - DNA, 23 bp, Artificial Sequence
  Description of Artificial Sequence: Synthetic primer
tcatcaaagagatcgttagcaga

SEQ ID NO: 407 - DNA, 20 bp, Artificial Sequence
  Description of Artificial Sequence: Synthetic primer
tctgcaggaaatcccatagc

SEQ ID NO: 408 - DNA, 25 bp, Artificial Sequence
  Description of Artificial Sequence: Synthetic primer
gctacctgttaaagaatcatctgga

SEQ ID NO: 409 - DNA, 20 bp, Artificial Sequence
  Description of Artificial Sequence: Synthetic primer
ggcagaccacaaactgagga

SEQ ID NO: 410 - DNA, 20 bp, Artificial Sequence
  Description of Artificial Sequence: Synthetic primer
gtggaaggaaatttgcgtgt

SEQ ID NO: 411 - DNA, 21 bp, Artificial Sequence
  Description of Artificial Sequence: Synthetic primer
ggatggtggtacagtcagagc

SEQ ID NO: 412 - DNA, 23 bp, Artificial Sequence
  Description of Artificial Sequence: Synthetic primer
aggaatctcagaaaaccaggaga

SEQ ID NO: 413 - DNA, 20 bp, Artificial Sequence
  Description of Artificial Sequence: Synthetic primer
gcatagccacaccactccat

SEQ ID NO: 414 - DNA, 20 bp, Artificial Sequence
  Description of Artificial Sequence: Synthetic primer
gtcaaagggtgcgcagatac

SEQ ID NO: 415 - DNA, 20 bp, Artificial Sequence
  Description of Artificial Sequence: Synthetic primer
ggtttgtctccgctgcttta

SEQ ID NO: 416 - DNA, 20 bp, Artificial Sequence
  Description of Artificial Sequence: Synthetic primer
gagatggagacaccccaatc

SEQ ID NO: 417 - DNA, 20 bp, Artificial Sequence
  Description of Artificial Sequence: Synthetic primer
ttgacaaaaccaccatcgtc

SEQ ID NO: 418 - DNA, 1992 bp, Homo sapiens
acacatggatattggatatctgcataggcagcttgctccacgccagtgcctacctgtgcagatgggaaggaaaggaaagtggcaaggaggcagagaaagcatctgtacccttacaatttggtgagacaagaatgtatgaattcccacaggtcaaattataatgaagaaaggaacctctcttgagtacaaagagctacctatggtggtctggagccggaggaccacagcatcaaaggatataagatgcatagccaactgaggaacctgagcaattaaagagatccacagttaagtcacacttaactggcacttgtggaagccccgcaaggcctgaaggagagctgacataggcaccccggagagccagaatctggatcccatcttaataaggccatgaacaccagtggagaagaggcagaaacaccaatggataaggaacattcacatctttcttcccatgtgcctctaagtgccagtgcaggccccacaggccaagctacagggagaaaggagatgacgcaaaggaacctaactggactttaatcactagaagtgagaagagaaatctattggaacctcccaagataatgccaagggtcaaagggtgcgcagatacataagaccatggaaataatatcagacaaaaagcagattagagcaattttctttttcgagttcaaaatgggttataaagcagcggagacaaaccgcaacatcaccaacgcctttggcccaggaactgctaatgaaggtacagtgcagtcactgttcaggaagttttgcaaaggagactagagccttgaagatgaggagcatagtgaccagccattggaagtcgacaaagaccaattgagaggaatcattgaagctgatcatcttacaactacacgagaagttgtcaaagaacgcaatgttgaccattgtgtggtcttttcgcatttgaagcaaattggaaaggtgaaaaacttgataagtgggtgccttgtgagctcagcaaaaatccaaaaaaataatcatttttaagtgttgtcttctcttattctacgcaacaacaataaccattttgcaatcggattgtgatgtgcaatgaaaagtggatttggggccgggcgcggtggctcacgcctgtaatctcagcactttggaaggccaaggcgggcagatcacgaggtcaggagatcaagaccgtcctggctaacacggtgaaaccccgtctctactgaaaatacaaaaaattagccgggtgtggtggctggcgcctgtagtcccagctacaggctgaggcaggagaatggcatgaacctgggaggcggagcttgcagtgagccgagaccgtgccactgcactccagcctgggcgacagagcgatactccgtcaaaaaaaaaaaaaaaaaaaaaaaaagacaagtggattttatatatggcaaccagcaatgaccagctcagtggctggactgagaagaagctccaaagcacttcccaaagccaaacttgcaccaaaaaaaaggtcagggtcactgtttggtggtctgctgctggtctgatccaccgctgctctctgaatcctggcaaaaccattacatctgagaagtatgctcaacaaatcaatgagctacgccaaaaactgcagcatctgcagctggcattggtcaacataacgggtccaattcttctccacgacaacgctcaactgcaccttgcgcaagcagcgcttcaaaagttgaacaaattgggctacatagtttttcctcatccgccatattcacctgacgtcttgccaactaactaccacttcttcaagtatctcaacaactttttgcagggaaaacacttccacaaccagcaggatgcagaacacgctttccaagagtttgtcgaatcctgacgcacagatttttatgctacaggaataaactaacttatttctcattggcaaaaatgtgttgattgtaatggttcctattttgatgaataaatgtgtgtttgagccta

SEQ ID NO: 419 - DNA, 1201 bp, Homo sapiens
gagatacggcctcgtgggaagggaaagacctgaccgtcccccagcccgacacccgtaaagggtctgtgctgaggaggattagtaaaaggggaaggcctcttgcagttgagataagaggaaggcctccgtctcctgcatgtccttgggaatggaatgtcttggtgtaaaacccgatagtacattccttctattctgagagaagaaaaccaccctgtggctggagggtgaaggtactctacagtgtggtcattgaggacaagttgacgagagagtcccaagtacgtccacggtcagccttgcgacatttaaagttctacaatgaactcactggagatgcaaagaaaagtgtggagatggagacaccccaatcgactcgccagtctacaggtgtatccagcagctccaaagagacagcaaccagcaagaatgggccatagtgacgatggtggttttgtcaaaaagaaaagggggggatatgtaaggaaaagagagatcagactttcactgtgtctatgtagaaaaggaagacataagaaactccattttgatctgtactaagaaaaattgttttgccttgagatgctgttaatctgtaactttagccccaaccctgtgctcacggaaacatgtgctgtaaggtttaagggatctagggctgtgcaggatgtaccttgttaacaatatgtttgcaggcagtatgtttggtaaaagtcatcgccattctccattctcgattaaccaggggctcaatgcactgtggaaagccacaggaacctctgcccaagaaagcctggctgttgtgggaagtcagggaccccgaatggagggaccagctggtgctgcatcaggaaacataaattgtgaagatttcttggacatttatcagtttccaaaattaatacttttataatttcttacacctgtcttactttaatctcttaatcctgttatctttgtaagctgaggatatacgtcacctcaggaccactattgtacaaattgattgtaaaacatgttcacatgtgtttgaacaatatgaaatcagtgcaccttgaaaatgaacagaataacagtgattttagggaacaaaggaagacaaccataaggtctgactgcctgaggggtcgggcaaaaagccatatttttcttcttgcagagagcctataaatggacgtgcaagtaggagagatattgctaaatt
